(19) United States
(12) Patent Application Publication
(10) Pub. No.: US 2025/0122500 A1
(43) Pub. Date: Apr. 17, 2025

(54) RNAi OLIGONUCLEOTIDE CONJUGATES

(71) Applicant: Dicerna Pharmaceuticals, Inc., Lexington, MA (US)

(72) Inventors: Bob Dale Brown, Littleton, MA (US); Maire Jung, Lincoln, MA (US); Travis Grim, Maynard, MA (US); Matthew Costales, Lexington, MA (US); Marc Abrams, Natick, MA (US); Martin Lee Koser, Westford, MA (US); Beata Kaminska, Waltham, MA (US); Jessica Lapierre, Lexington, MA (US)

(21) Appl. No.: 18/654,127

(22) Filed: May 3, 2024

Related U.S. Application Data
(63) Continuation-in-part of application No. PCT/US22/49230, filed on Nov. 8, 2022.
(63) Continuation-in-part of application No. PCT/US22/79301, filed on Nov. 4, 2022.
(63) Continuation-in-part of application No. PCT/US22/79302, filed on Nov. 4, 2022.
(60) Provisional application No. 63/340,291, filed on May 10, 2022.
(60) Provisional application No. 63/277,097, filed on Nov. 8, 2021.
(60) Provisional application No. 63/276,409, filed on Nov. 5, 2021.
(60) Provisional application No. 63/276,406, filed on Nov. 5, 2021.

(51) Int. Cl. C12N 15/113

(52) U.S. Cl. CPC C12N 15/113; C12N 2310/11; C12N 2310/315; C12N 2310/321; C12N 2310/322; C12N 2310/3515; C12N 2320/32

(57) ABSTRACT

Lipid-conjugated oligonucleotide are provided herein that inhibit or reduce expression of target genes. Also provided are compositions including the same and uses thereof, particularly uses relating to treating diseases, disorders and/or conditions associated with an RNAi trigger induced decrease in target gene expression.

### CROSS-REFERENCE TO RELATED APPLICATIONS

[0001] This application is a Continuation-in-Part of PCT/US2022/049230 filed Nov. 8, 2022, which claims the benefit of U.S. Provisional Patent Application No. 63/277,097 filed Nov. 8, 2021, and U.S. Provisional Patent Application No. 63/340,291 filed May 10, 2022, each of which are incorporated by reference herein in their entirety. This application is a Continuation-in-Part of PCT/US2022/079302 filed Nov. 4, 2022, which claims the benefit of U.S. Provisional Patent Application No. 63/276,406 filed Nov. 5, 2021, each of which are incorporated by reference herein in their entirety. This application is a Continuation-in-Part of PCT/US2022/079301 filed Nov. 4, 2022, which claims the benefit of U.S. Provisional Patent Application No. 63/276,409 filed Nov. 5, 2021, each of which are incorporated by reference herein in their entirety.

### REFERENCE TO ELECTRONIC SEQUENCE LISTING

[0002] The application contains a Sequence Listing which has been submitted electronically in .XML format and is hereby incorporated by reference in its entirety. Said .XML copy, created on Jul. 8, 2024, is named “DCY-10601.xml” and is 5,775,798 bytes in size. The sequence listing contained in this .XML file is part of the specification and is hereby incorporated by reference herein in its entirety.

### TECHNICAL FIELD

[0003] The disclosure relates to oligonucleotides linked to lipid moieties useful in the inhibition of target genes in a variety of tissues. Specifically, the present disclosure relates to oligonucleotide-lipid conjugates, methods to prepare them, their chemical configuration, and methods to modulate (e.g., inhibit or reduce) the expression of a target gene using the conjugated nucleic acids and oligonucleotides according to the description provided herein. The disclosure also provides pharmaceutically acceptable compositions comprising the conjugates of the present description and methods of using said compositions in the treatment of various diseases or disorders.

### BACKGROUND OF THE DISCLOSURE

[0004] Regulation of gene expression by modified nucleic acids shows great potential as both a research tool in the laboratory and a therapeutic approach in the clinic. Several classes of oligonucleotide or nucleic acid-based therapeutics have been under the clinical investigation, including antisense oligonucleotides (ASO), short interfering RNA (siRNA), double-stranded nucleic acids (dsNA), aptamers, ribozymes, exon-skipping and splice-altering oligonucleotides, immunomodulatory oligonucleotides, mRNAs, and CRISPR. Chemical modifications in the relevant molecules to allow functionality in various tissues, organs and/or cell types play a key role in overcoming challenges of oligonucleotide therapeutics, including improving nuclease stability, RNA-binding affinity, and pharmacokinetics. Various chemical modification strategies for oligonucleotides have been developed in the past three decades including modification of the sugars, nucleobases, and phosphodiester backbone to improve and optimize performance and therapeutic efficacy (Deleavey and Darma, CHEM. BIOL. 2012, 19(8):937-54; Wan and Seth, J. MED. CHEM. 2016, 59 (21): 9645-67; and Egli and Manoharan, ACC. CHEM. RES. 2019, 54 (4): 1036-47).

[0005] Dicer processed RNAi technologies utilize short double-stranded RNA (dsRNA) of approximately 21 base pair length with a two nucleotide (nt) 3′-overhang for the silencing of genes. These dsRNAs are generally called small interfering RNA (siRNA). SiRNA 12 to 22 nucleotides in length are the active agent in RNAi. The siRNA duplex serves as a guide for mRNA degradation. Upon siRNA incorporation into the RNA-induced silencing complex (RISC) the complex interacts with a specific mRNA and ultimately suppresses the mRNA signal. The sense strand or passenger strand of siRNA is typically cleaved at the 9th nucleotide downstream from the 5′-end of the sense strand by Argonaute 2 (Ago2) endonuclease. The activated RISC complex containing the antisense strand or guide strand binds to the target mRNA through Watson-Crick base pairing causing degradation or translational blocking of the targeted RNA.

[0006] However, the in vivo use of RNAi or siRNA molecules as pharmaceuticals has remained difficult due to obstacles encountered such as low biostability and unacceptable toxicity possibly caused by off-target effects. Various types of chemical modifications to improve the pharmacokinetics and to overcome bio-instability problems have been investigated over the years to improve the stability and specificity of the RNAi duplexes. In some cases, the chemical modification in siRNAs has improved the serum stability of siRNAs. However, often RNAi activity was lost, but the careful placement of some specific modified residues enables enhanced siRNA biostability without loss of siRNA potency. Some of these modifications have reduced siRNA side effects, such as the induction of recipient immune responses and inherent off-targeting effects and have even enhanced siRNA potency. Various chemically modified siRNAs have been investigated, among them were bridged nucleic acids (BNA's) such as 2′,4′-methylene bridged nucleic acid 2′,4′-BNAs, also known as locked nucleic acid or LNA's. Some of these modified siRNAs showed promising effects.

[0007] Therapeutic gene silencing mediated by RNAi oligonucleotide-based therapeutics comprising siRNAs or double-stranded nucleic acids (dsNAs) offer the potential for considerable expansion of the druggable target space and the possibility for treating orphan diseases that may be therapeutically unapproachable by other drug modalities (e.g., antibodies and/or small molecules). RNAi oligonucleotide-based therapeutics that inhibit or reduce expression of specific target genes in the liver have been developed and are currently in clinical use (Sehgal et al., (2013) JOURNAL OF HEPATOLOGY 59:1354-59). Technological hurdles remain for the development and clinical use of RNAi oligonucleotides in extrahepatic cells, tissues, and organs. Thus, an ongoing need exists in the art for the successful development of new and effective RNAi oligonucleotides to modulate the expression of a target genes in extrahepatic cells, tissues, and/or organs. This is complicated by the variant nature of the cell types in extrahepatic as well as concerns about circulatory patterns and cell membrane constituents such as receptor types.

[0008] Over the past decade, synthetic RNAi triggers such as double stranded RNAs have become ubiquitous tools in biological research, and extensive basic and clinical development efforts have recently culminated in the FDA approval of ONPATTRO™, the first RNAi drug. Despite a burgeoning drug development pipeline and an extensive compendium of excipients targeting ligands and delivery techniques, the difficulty of delivering RNAi agents to specific populations of disease related cells and or tissues, particularly outside the liver continues to limit the potential of RNAi therapy. Repeated attempts over the past several years to develop useful, active, and persistent RNAi agents and structures for use based on known liver delivery technology have not convincingly demonstrated the intended effects outside the liver. Thus, new dsRNA's with variant structures have been developed to overcome the limitations in the field.

### BRIEF SUMMARY OF THE DISCLOSURE

[0009] The present disclosure is based in part on the discovery of lipid-conjugated RNAi oligonucleotides that are capable of inhibiting expression of a target gene in hepatic and extrahepatic tissues. As demonstrated herein, lipid-conjugated RNAi oligonucleotides having a stem-loop at the 5′ end of the oligonucleotide showed comparable efficacy in reducing target gene expression in several regions of the central nervous system as a lipid-conjugated RNAi oligonucleotide having a stem-loop at the 3′ end of the oligonucleotide. Further, the presence of a stable stem-loop (e.g., UACG) improved reduction of target gene expression compared to a relatively less stable stem-loop (e.g., GAAA). In some aspects, the presence of a Tm-increasing nucleotide (e.g., locked nucleic acid) and/or truncation of a sense strand at the 3′ terminus improved reduction of target gene expression.

[0010] It is further shown herein that lipid-conjugated RNAi oligonucleotides having a “double-overhang” (e.g., an overhang of at least one nucleotide at each of the 5′ and 3′ termini of an antisense strand) reduced target gene expression in the central nervous system at comparable levels relative to an RNAi oligonucleotide having only one overhang, i.e., at the 3′ terminus of the antisense strand. Up to three nucleotide truncations at the 3′ terminus of the sense strand was tolerated, whereas introduction of a Tm-increasing nucleotide allowed for truncations of up to four nucleotides.

[0011] It has been demonstrated lipid-conjugated RNAi oligonucleotides delivered to the eye can effectively reduce expression of an ocular mRNA. Specifically, double-overhang RNAi oligonucleotides having a lipid conjugated to the 5′ terminal nucleotide of the sense strand reduced expression of a target gene in the optic nerve and retina.

[0012] Further shown herein, are lipid-conjugated RNAi oligonucleotides capable of reducing expression of a target gene in a macrophage of the liver. Specifically, RNAi oligonucleotides having a blunt end comprising the 3′ terminus of the sense strand and the 5′ terminus of the antisense strand, and an overhang of up to seven nucleotides on the 3′ terminus of the antisense strand, resulted in reduced expression of a gene expressed in macrophages. Further, lipid-conjugated RNAi oligonucleotides having a double-overhang, with or without Tm-increasing nucleotides, similarly reduced expression of the macrophage target gene. Macrophages make up about 33% of all liver cells and are believed to play a role in liver inflammation. Accordingly, without wishing to be bound by theory, the lipid-conjugated RNAi oligonucleotides disclosed herein are useful for targeting macrophages and treating liver diseases, including, but not limited to, drug or alcohol toxicity, steatosis, infection (e.g., viral infection), inflammatory liver diseases, fibrosis, hepatocellular carcinoma, and cirrhosis.

[0013] Also shown according to the current disclosure are the bases of the lipid-conjugated RNAi oligonucleotides modified by the addition of LNA, 2′-O-methyl modification, or phosphorothioate (PS) modification; either or both termini of the sense strand are modified with PS modification, 2′-O-methyl modification, or both; or the single strand overhang of the antisense sense strand is modified by LNA modification, 2′-O-methyl modification, PS modification, or any combination thereof. In some embodiments, the sense strand and the antisense strand of the RNAi trigger are modified by different chemical modifications.

[0014] Also shown herein are lipid-conjugated RNAi oligonucleotides having either a blunt end or a stem-loop at the 3′ terminus of the oligonucleotides, with truncated sense strands (e.g., having an overhang at the 3′ terminus of the antisense strand) and Tm-increasing nucleotides, are capable of reducing target gene expression in several tissues, including the liver, skeletal muscle, adipose and adrenal.

[0015] Without wishing to be bound by theory, the lipid-conjugated RNAi oligonucleotides described herein are useful for reducing expression of a target gene in both hepatic and extrahepatic tissues.

[0016] In some aspects, the disclosure provides a double-stranded oligonucleotide comprising an antisense strand of about 20-22 nucleotides in length and a sense strand of about 8-20 nucleotides in length, wherein the antisense and sense strands form a duplex region of about 8-20 base pairs, wherein the antisense strand comprises an orientation of 5′ to 3′, wherein the antisense strand comprises a 5′ overhang of at least one nucleotide and a 3′ overhang of at least one nucleotide, wherein the antisense strand comprises a region of complementarity to a mRNA target sequence, and wherein the sense strand comprises at least one lipid moiety conjugated to a nucleotide on the sense strand. In some aspects, the 5′ overhang is about 1-10 nucleotides. In some aspects, the 5′ overhang is about 2-10 nucleotides. In some aspects, the 5′ overhang is about 1-6 nucleotides. In some aspects, the 3′ overhang is about 2-8 nucleotides. In some aspects, the 3′ overhang is about 2-12 nucleotides. In some aspects, the 5′ overhang is 2 nucleotides and the 3′ overhang is about 3-7 nucleotides. In some aspects, the 3′ overhang is 2 nucleotides, and the 5′ overhang is about 2-8 nucleotides. In some aspects, the 3′ overhang is 6-8 nucleotides, and the 5′ overhang is about 2-4 nucleotides.

[0017] In any of the foregoing or related aspects,
[0018] (i) the sense strand is 18 nucleotides, the duplex region is 18 nucleotides, the 5′ overhang is 2 nucleotides and the 3′ overhang is 2 nucleotides;
[0019] (ii) the sense strand is 17 nucleotides, the duplex region is 17 nucleotides, the 5′ overhang is 3 nucleotides and the 3′ overhang is 2 nucleotides;
[0020] (iii) the sense strand is 16 nucleotides, the duplex region is 16 nucleotides, the 5′ overhang is 4 nucleotides and the 3′ overhang is 2 nucleotides; or
[0021] (iv) the sense strand is 13 nucleotides, the duplex region is 13 nucleotides, the 5′ overhang is 2 nucleotides and the 3′ overhang is 7 nucleotides.

[0022] In any of the foregoing or related aspects,
[0023] (i) the sense strand is 12 nucleotides, the duplex region is 12 nucleotides, the 5′ overhang is 2 nucleotides. and the 3′ overhang is 8 nucleotides;
[0024] (ii) the sense strand is 12 nucleotides, the duplex region is 12 nucleotides, the 5′ overhang is 3 nucleotides, and the 3′ overhang is 7 nucleotides; or
[0025] (iii) the sense strand is 10 nucleotides, the duplex region is 10 nucleotides, the 5′ overhang is 1 nucleotide, and the 3′ overhang is 11 nucleotides.

[0026] In some aspects, the sense strand is 13 nucleotides, the duplex region is 13 nucleotides, the 5′ overhang is 2 nucleotides, and the 3′ overhang is 7 nucleotides. In other aspects, the sense strand is 12 nucleotides, the duplex region is 12 nucleotides, the 5′ overhang is 2 nucleotides. and the 3′ overhang is 8 nucleotides. In other aspects, the sense strand is 12 nucleotides, the duplex region is 12 nucleotides, the 5′ overhang is 3 nucleotides, and the 3′ overhang is 7 nucleotides. In some aspects, the sense strand is 10 nucleotides, the duplex region is 10 nucleotides, the 5′ overhang is 1 nucleotide, and the 3′ overhang is 11 nucleotides.

[0027] In any of the foregoing or related aspects, the lipid moiety is selected from:

[chemical structure]

[0028] In some aspects, the lipid moiety is a hydrocarbon chain. In some aspects, the hydrocarbon chain is a C8-C30 hydrocarbon chain. In some aspects, the hydrocarbon chain is a C16 hydrocarbon chain. In some aspects, the C16 hydrocarbon chain is represented by

[chemical structure]

[0029] In some aspects, the hydrocarbon chain is a C22 hydrocarbon chain. In some aspects, the C22 hydrocarbon chain is represented by

[chemical structure]

[0030] In any of the foregoing or related aspects, the lipid moiety is conjugated to the 5′ terminal nucleotide of the sense strand. In some aspects, the lipid moiety is conjugated to the 2′ carbon of the ribose ring of the nucleotide.

[0031] In any of the foregoing or related aspects, the antisense strand is 22 nucleotides, wherein positions are numbered 1-22 from 5′ to 3′. In some aspects, the nucleotide conjugated to the lipid moiety forms a base pair with a nucleotide at position 14 of the antisense strand, wherein positions are numbered 5′ to 3′. In some aspects, the nucleotide conjugated to the lipid moiety forms a base pair with a nucleotide at position 12, 14, or 16 of the antisense strand, wherein positions are numbered 5′ to 3′.

[0032] In any of the foregoing or related aspects, the region of complementarity is fully complementary to the mRNA target sequence. In other aspects, the region of complementarity is partially complementary to the mRNA target sequence. In some aspects, the region of complementarity comprises no more than four mismatches to the mRNA target sequence. In some aspects, the region of complementarity comprises up to four mismatches to the mRNA target sequence.

[0033] In some aspects, the region of complementarity comprises no more than four mismatches to the mRNA target sequence.

[0034] In any of the foregoing or related aspects, the mRNA target sequence is a central nervous system (CNS) target sequence. In some aspects, the CNS target sequence is a neuronal mRNA target sequence or an ocular mRNA target sequence. In some aspects, the mRNA target sequence is a liver mRNA target sequence. In some aspects, the liver mRNA target sequence is a liver macrophage mRNA target sequence. In some aspects, the liver mRNA target sequence is a liver hepatocyte mRNA target sequence. In some aspects, the liver mRNA target sequence is a liver sinusoidal endothelial cell mRNA target sequence. In other aspects, the mRNA target sequence is an ocular mRNA target sequence.

[0035] In any of the foregoing or related aspects, the oligonucleotide comprises at least one modified nucleotide. In some aspects, the modified nucleotide comprises a 2′-modification. In some aspects, each of the nucleotides of the sense strand and the antisense strand comprise a 2′-modification. In some aspects, the 2′-modification is a modification selected from 2′-aminoethyl, 2′-fluoro, 2′-O-methyl, 2′-O-methoxyethyl, and 2′-deoxy-2′-fluoro-β-d-arabinonucleic acid. In some aspects, the sense strand comprises nucleotide positions numbered 5′ to 3′, wherein each of positions 8-11 comprise a 2′-fluoro modification. In some aspects, the sense strand comprises a 2′-fluoro modification at each of nucleotides forming a base pair with nucleotides at positions 10-13 of the antisense strand, wherein positions are numbered 5′ to 3′. In some aspects, the antisense strand comprises 22 nucleotides with positions 1-22 from 5′ to 3′, and wherein each of positions 2, 3, 4, 5, 7, 10 and 14 comprise a 2′-fluoro modification. In some aspects, the remaining nucleotides comprise a 2′-O-methyl modification, provided that the nucleotide of the sense strand conjugated to the at least one lipid moiety does not comprise a 2′-O-methyl modification.

[0036] In any of the foregoing or related aspects, the oligonucleotide comprises at least one modified internucleotide linkage. In some aspects, the at least one modified internucleotide linkage is a phosphorothioate linkage. In some aspects, the antisense strand comprises a phosphorothioate linkage (i) between positions 1 and 2, and between positions 2 and 3; or (ii) between positions 1 and 2, between positions 2 and 3, and between positions 3 and 4, wherein positions are numbered 1-4 from 5′ to 3′. In some aspects, the antisense strand is 22 nucleotides in length, and wherein the antisense strand comprises a phosphorothioate linkage between positions 20 and 21 and between positions 21 and 22, wherein positions are numbered 1-22 from 5′ to 3′. In some aspects, the antisense strand comprises a phosphorothioate linkage between positions 13 and 14, and between positions 14 and 15. In some aspects, the sense strand comprises a phosphorothioate linkage between positions 1 and 2, between the penultimate nucleotide and third nucleotide from the 3′ end, and between the penultimate nucleotide and ultimate nucleotide.

[0037] In any of the foregoing or related aspects, the antisense strand comprises a phosphorylated nucleotide at the 5′ terminus, wherein the phosphorylated nucleotide is selected from uridine and adenosine. In some aspects, the phosphorylated nucleotide is uridine. In some aspects, the 4′-carbon of the sugar of the 5′-nucleotide of the antisense strand comprises a phosphate analog. In some aspects, the phosphate analog is oxymethyl phosphonate, vinyl phosphonate or malonyl phosphonate. In some aspects, the phosphorylated nucleotide is 4′-O-monomethylphosphonate-2′-O-methyl uridine.

[0038] In any of the foregoing or related aspects, the sense strand comprises at least one Tm-increasing nucleotide. In some aspects, the sense strand comprises up to four Tm-increasing nucleotides. In some aspects, the Tm-increasing nucleotide is a bicyclic nucleotide. In some aspects, the Tm-increasing nucleotide is a locked nucleic acid.

[0039] In other aspects, the disclosure provides a double-stranded oligonucleotide comprising an antisense strand of 22 nucleotides in length and a sense strand of 18 nucleotides in length, wherein the antisense and sense strands form a duplex region of 18 base pairs, wherein the antisense strand comprises an orientation of 5′ to 3′, wherein the antisense strand comprises a 5′ overhang comprising at least two nucleotides and a 3′ overhang comprising at least two nucleotides, wherein the antisense strand comprises a region of complementarity to a mRNA target sequence, wherein the sense strand comprises at least one lipid moiety conjugated to a 5′ terminal nucleotide of the sense strand, and wherein each of the antisense and sense strands comprise at least one 2′-modified nucleotide and at least one modified internucleotide linkage.

[0040] In some aspects, the sense strand comprises a 2′-fluoro modification at positions 8-11, numbered 5′ to 3′. In some aspects, the antisense strand comprises a 2′-fluoro modification at positions 2-5, 7, 10 and 14, numbered 5′ to 3′. In some aspects, the remaining nucleotides comprise a 2′-O-methyl modification, provided that the nucleotide of the sense strand conjugated to the at least one lipid moiety does not comprise a 2′-O-methyl modification. In some aspects, the at least one modified internucleotide linkage is a phosphorothioate linkage. In some aspects, the sense strand comprises phosphorothioate linkages between nucleotides at positions 1 and 2, 16 and 17, and 17 and 18, numbered 5′ to 3′. In some aspects, the antisense strand comprises phosphorothioate linkages between nucleotides at positions 1 and 2, 2 and 3, 3 and 4, 20 and 21, and 21 and 22, numbered 5′ to 3′. In some aspects, the antisense strand comprises a phosphorylated uridine at position 1, numbered 5′ to 3′. In some aspects, the phosphorylated uridine is 4′-O-monomethylphosphonae-2′-O-methyl uridine. In some aspects, the lipid moiety is a C16 hydrocarbon represented by:

[chemical structure]

[0041] In some aspects, the lipid moiety is a C22 hydrocarbon represented by:

[chemical structure]

[0042] In some aspects, the lipid moiety is conjugated to the 2′ carbon of the ribose ring of the nucleotide. In some aspects, the 5′ overhang is 2 nucleotides and the 3′ overhang is 2 nucleotides. In some aspects, the region of complementarity is fully complementary to the mRNA target sequence. In some aspects, the region of complementarity is partially complementary to the mRNA target sequence. In some aspects, the region of complementarity comprises no more than four mismatches to the mRNA target sequence. In some aspects, the mRNA target sequence is a central nervous system (CNS) target sequence, optionally a neuronal mRNA target sequence or an ocular mRNA target sequence. In some aspects, the mRNA target sequence is a liver mRNA target sequence, optionally a liver macrophage mRNA target sequence, a liver hepatocyte mRNA target sequence, or a liver sinusoidal endothelial cell mRNA target sequence. In some aspects, the mRNA target sequence is an ocular mRNA target sequence. In some aspects, the mRNA target sequence is an astrocyte mRNA target sequence.

[0043] In some aspects, the disclosure provides a double-stranded oligonucleotide comprising an antisense strand of 22 nucleotides in length and a sense strand of 18 nucleotides in length, wherein the antisense and sense strands form a duplex region of 18 base pairs, wherein the antisense strand comprises an orientation of 5′ to 3′, wherein the antisense strand comprises a 5′ overhang comprising two nucleotides and a 3′ overhang comprising two nucleotides, wherein the antisense strand comprises a region of complementarity to a central nervous system mRNA target sequence, wherein the sense strand comprises at least one lipid moiety conjugated to a 5′ terminal nucleotide of the sense strand, wherein the sense strand comprises a 2′-fluoro modification at positions 8-11 and a 2′-O-methyl modification at positions 2-7 and 12-18, wherein the sense strand comprises a phosphorothioate linkage between positions 1 and 2, positions 16 and 17, and positions 17 and 18, wherein the antisense strand comprises a 2′-fluoro modification at positions 2-5, 7, 10 and 14 and a 2′-O-methyl modification at positions 1, 6, 8, 9, 11-13, and 15-22, wherein the antisense strand comprises phosphorothioate linkages between positions 1 and 2, positions 2 and 3, positions 3 and 4, positions 20 and 21, and positions 21 and 22, and wherein the antisense strand comprises a 5′ terminal phosphorylated uridine.

[0044] In some aspects, the disclosure provides a double-stranded oligonucleotide comprising an antisense strand of 22 nucleotides in length and a sense strand of 18 nucleotides in length, wherein the antisense and sense strands form a duplex region of 18 base pairs, wherein the antisense strand comprises an orientation of 5′ to 3′, wherein the antisense strand comprises a 5′ overhang comprising two nucleotides and a 3′ overhang comprising two nucleotides, wherein the antisense strand comprises a region of complementarity to an ocular mRNA target sequence, wherein the sense strand comprises at least one lipid moiety conjugated to a 5′ terminal nucleotide of the sense strand, wherein the sense strand comprises a 2′-fluoro modification at positions 8-11 and a 2′-O-methyl modification at positions 2-7 and 12-18, wherein the sense strand comprises a phosphorothioate linkage between positions 1 and 2, positions 16 and 17, and positions 17 and 18, wherein the antisense strand comprises a 2′-fluoro modification at positions 2-5, 7, 10 and 14 and a 2′-O-methyl modification at positions 1, 6, 8, 9, 11-13, and 15-22, wherein the antisense strand comprises phosphorothioate linkages between positions 1 and 2, positions 2 and 3, positions 3 and 4, positions 20 and 21, and positions 21 and 22, and wherein the antisense strand comprises a 5′ terminal phosphorylated uridine.

[0045] In some aspects, the disclosure provides a double-stranded oligonucleotide comprising an antisense strand of 22 nucleotides in length and a sense strand of 18 nucleotides in length, wherein the antisense and sense strands form a duplex region of 18 base pairs, wherein the antisense strand comprises an orientation of 5′ to 3′, wherein the antisense strand comprises a 5′ overhang comprising two nucleotides and a 3′ overhang comprising two nucleotides, wherein the antisense strand comprises a region of complementarity to a macrophage mRNA target sequence, wherein the sense strand comprises at least one lipid moiety conjugated to a 5′ terminal nucleotide of the sense strand, wherein the sense strand comprises a 2′-fluoro modification at positions 8-11 and a 2′-O-methyl modification at positions 2-7 and 12-18, wherein the sense strand comprises a phosphorothioate linkage between positions 1 and 2, positions 16 and 17, and positions 17 and 18, wherein the antisense strand comprises a 2′-fluoro modification at positions 2-5, 7, 10 and 14 and a 2′-O-methyl modification at positions 1, 6, 8, 9, 11-13, and 15-22, wherein the antisense strand comprises phosphorothioate linkages between positions 1 and 2, positions 2 and 3, positions 3 and 4, positions 20 and 21, and positions 21 and 22, and wherein the antisense strand comprises a 5′ terminal phosphorylated uridine.

[0046] In other aspects, the disclosure provides a double-stranded oligonucleotide comprising an antisense strand of 22 nucleotides in length and a sense strand of 17 nucleotides in length, wherein the antisense and sense strands form a duplex region of 17 base pairs, wherein the antisense strand comprises an orientation of 5′ to 3′, wherein the antisense strand comprises a 5′ overhang comprising at least three nucleotides and a 3′ overhang comprising at least two nucleotides, wherein the antisense strand comprises a region of complementarity to a mRNA target sequence, wherein the sense strand comprises at least one lipid moiety conjugated to a 5′ terminal nucleotide of the sense strand, and wherein each of the antisense and sense strands comprise at least one 2′-modified nucleotide and at least one modified internucleotide linkage.

[0047] In some aspects, the sense strand comprises a 2′-fluoro modification at positions 8-11, numbered 5′ to 3′. In some aspects, the antisense strand comprises a 2′-fluoro modification at positions 2-5, 7, 10 and 14, numbered 5′ to 3′. In some aspects, the remaining nucleotides comprise a 2′-O-methyl modification, provided that the nucleotide of the sense strand conjugated to the at least one lipid moiety does not comprise a 2′-O-methyl modification. In some aspects, the at least one modified internucleotide linkage is a phosphorothioate linkage. In some aspects, the sense strand comprises phosphorothioate linkages between nucleotides at positions 1 and 2, 15 and 16, and 16 and 17, numbered 5′ to 3′. In some aspects, the antisense strand comprises phosphorothioate linkages between nucleotides at positions 1 and 2, 2 and 3, 3 and 4, 20 and 21, and 21 and 22, numbered 5′ to 3′. In some aspects, the antisense strand comprises a phosphorylated uridine at position 1, numbered 5′ to 3′. In some aspects, the phosphorylated uridine is 4′-O-monomethylphosphonae-2′-O-methyl uridine. In some aspects, the lipid moiety is a C16 hydrocarbon represented by:

[chemical structure]

[0048] In some aspects, the lipid moiety is conjugated to the 2′ carbon of the ribose ring of the nucleotide. In some aspects, the 5′ overhang is 3 nucleotides and the 3′ overhang is 2 nucleotides. In some aspects, the region of complementarity is fully complementary to the mRNA target sequence. In some aspects, the region of complementarity is partially complementary to the mRNA target sequence. In some aspects, the region of complementarity comprises no more than four mismatches to the mRNA target sequence. In some aspects, the mRNA target sequence is a central nervous system (CNS) target sequence, optionally a neuronal mRNA target sequence.

[0049] In other aspects, the disclosure provides a double-stranded oligonucleotide comprising an antisense strand of 22 nucleotides in length and a sense strand of 17 nucleotides in length, wherein the antisense and sense strands form a duplex region of 17 base pairs, wherein the antisense strand comprises an orientation of 5′ to 3′, wherein the antisense strand comprises a 5′ overhang comprising three nucleotides and a 3′ overhang comprising two nucleotides, wherein the antisense strand comprises a region of complementarity to a central nervous system mRNA target sequence, wherein the sense strand comprises at least one lipid moiety conjugated to a 5′ terminal nucleotide of the sense strand, wherein the sense strand comprises a 2′-fluoro modification at positions 8-11 and a 2-O-methyl modification at positions 2-7 and 12-17, wherein the sense strand comprises phosphorothioate linkages between positions 1 and 2, positions 15 and 16, and positions 16 and 17, wherein the antisense strand comprises a 2′-fluoro modification at positions 2-5, 7, 10 and 14 and a 2-O-methyl modification at positions 1, 6, 8, 9, 11-13, and 15-22, wherein the antisense strand comprises phosphorothioate linkages between positions 1 and 2, positions 2 and 3, positions 3 and 4, positions 20 and 21, and positions 21 and 22, and wherein the antisense strand comprises a 5′ terminal phosphorylated uridine.

[0050] In further aspects, the disclosure provides a double-stranded oligonucleotide comprising an antisense strand of 22 nucleotides in length and a sense strand of 16 nucleotides in length, wherein the antisense and sense strands form a duplex region of 16 base pairs, wherein the antisense strand comprises an orientation of 5′ to 3′, wherein the antisense strand comprises a 5′ overhang comprising at least four nucleotides and a 3′ overhang comprising at least two nucleotides, wherein the antisense strand comprises a region of complementarity to a mRNA target sequence, wherein the sense strand comprises at least one lipid moiety conjugated to a 5′ terminal nucleotide of the sense strand, wherein the sense strand comprises up to five Tm-increasing nucleotides, and wherein each of the antisense and sense strands comprise at least one 2′-modified nucleotide and at least one modified internucleotide linkage.

[0051] In some aspects, the sense strand comprises a 2′-fluoro modification at positions 8-11, numbered 5′ to 3′. In some aspects, the antisense strand comprises a 2′-fluoro modification at positions 2-5, 7, 10 and 14, numbered 5′ to 3′. In some aspects, the remaining nucleotides comprise a 2′-O-methyl modification, provided that the nucleotide of the sense strand conjugated to the at least one lipid moiety does not comprise a 2′-O-methyl modification. In some aspects, the at least one modified internucleotide linkage is a phosphorothioate linkage. In some aspects, the sense strand comprises phosphorothioate linkages between nucleotides at positions 1 and 2, 14 and 15, and 15 and 16, numbered 5′ to 3′. In some aspects, the antisense strand comprises phosphorothioate linkages between nucleotides at positions 1 and 2, 2 and 3, 3 and 4, 20 and 21, and 21 and 22, numbered 5′ to 3′. In some aspects, the antisense strand comprises a phosphorylated uridine at position 1, numbered 5′ to 3′. In some aspects, the phosphorylated uridine is 4′-O-monomethylphosphonae-2′-O-methyl uridine. In some aspects, the lipid moiety is a C16 hydrocarbon represented by:

[chemical structure]

[0052] In some aspects, the lipid moiety is conjugated to the 2′ carbon of the ribose ring of the nucleotide. In some aspects, the 5′ overhang is 4 nucleotides and the 3′ overhang is 2 nucleotides. In some aspects, the sense strand comprises 1-5, 1-4, 1-3, or 1-2 Tm-increasing nucleotides. In some aspects, the sense strand comprises 1, 2, 3, 4 or 5 Tm-increasing nucleotides. In some aspects, the sense strand comprises up to three Tm-increasing nucleotides. In some aspects, the sense strand comprises a Tm-increasing nucleotide at positions 2, 15 and 16, numbered 5′ to 3′. In some aspects, the Tm-increasing nucleotide is a bicyclic nucleotide, optionally, a locked nucleic acid (LNA). In some aspects, the region of complementarity is fully complementary to the mRNA target sequence. In some aspects, the region of complementarity is partially complementary to the mRNA target sequence. In some aspects, the region of complementarity comprises no more than four mismatches to the mRNA target sequence. In some aspects, the mRNA target sequence is a central nervous system (CNS) target sequence, optionally a neuronal mRNA target sequence or an ocular mRNA target sequence.

[0053] In further aspects, the disclosure provides a double-stranded oligonucleotide comprising an antisense strand of 22 nucleotides in length and a sense strand of 16 nucleotides in length, wherein the antisense and sense strands form a duplex region of 16 base pairs, wherein the antisense strand comprises an orientation of 5′ to 3′, wherein the antisense strand comprises a 5′ overhang comprising at least four nucleotides and a 3′ overhang comprising at least two nucleotides, wherein the antisense strand comprises a region of complementarity to a central nervous system mRNA target sequence, wherein the sense strand comprises at least one lipid moiety conjugated to a 5′ terminal nucleotide of the sense strand, wherein the sense strand comprises a Tm-increasing nucleotide at positions 2, 15 and 16, wherein the sense strand comprises a 2′-fluoro modification at positions 8-11 and a 2-O-methyl modification at positions 3-7 and 12-13, wherein the sense strand comprises phosphorothioate linkages between positions 1 and 2, positions 14 and 15, and positions 15 and 16, wherein the antisense strand comprises a 2′-fluoro modification at positions 2-5, 7, 10 and 14 and a 2-O-methyl modification at positions 1, 6, 8, 9, 11-13, and 15-22, wherein the antisense strand comprises phosphorothioate linkages between positions 1 and 2, positions 2 and 3, positions 3 and 4, positions 20 and 21, and positions 21 and 22, and wherein the antisense strand comprises a 5′ terminal phosphorylated uridine.

[0054] In yet further aspects, the disclosure provides a double-stranded oligonucleotide comprising an antisense strand of 22 nucleotides in length and a sense strand of 13 nucleotides in length, wherein the antisense and sense strands form a duplex region of 13 base pairs, wherein the antisense strand comprises an orientation of 5′ to 3′, wherein the antisense strand comprises a 5′ overhang comprising at least two nucleotides and a 3′ overhang comprising at least seven nucleotides, wherein the antisense strand comprises a region of complementarity to a mRNA target sequence, wherein the sense strand comprises at least one lipid moiety conjugated to an internal nucleotide of the sense strand, wherein the sense strand comprises up to three Tm-increasing nucleotides, and wherein each of the antisense and sense strands comprise at least one 2′-modified nucleotide and at least one modified internucleotide linkage.

[0055] In some aspects, the sense strand comprises a 2′-fluoro modification at positions 3-6, numbered 5′ to 3′. In some aspects, the antisense strand comprises a 2′-fluoro modification at positions 2-5, 7, 10 and 14, numbered 5′ to 3′. In some aspects, the remaining nucleotides comprise a 2′-O-methyl modification, provided that the nucleotide of the sense strand conjugated to the at least one lipid moiety does not comprise a 2′-O-methyl modification. In some aspects, the at least one modified internucleotide linkage is a phosphorothioate linkage. In some aspects, the sense strand comprises phosphorothioate linkages between nucleotides at positions 1 and 2, 11 and 12, and 12 and 13, numbered 5′ to 3′. In some aspects, the antisense strand comprises phosphorothioate linkages between nucleotides at positions 1 and 2, 2 and 3, 3 and 4, 20 and 21, and 21 and 22, numbered 5′ to 3′. In some aspects, the antisense strand comprises a phosphorylated uridine at position 1, numbered 5′ to 3′. In some aspects, the phosphorylated uridine is 4′-O-monomethylphosphonae-2′-O-methyl uridine. In some aspects, the lipid moiety is conjugated at a nucleotide at position 2 of the sense strand, numbered 5′ to 3′. In some aspects, the lipid moiety is a C22 hydrocarbon represented by:

[chemical structure]

[0056] In some aspects, the lipid moiety is conjugated to the 2′ carbon of the ribose ring of the nucleotide. In some aspects, the 5′ overhang is 2 nucleotides and the 3′ overhang is 7 nucleotides. In some aspects, the sense strand comprises 1-3, or 1-2 Tm-increasing nucleotides. In some aspects, the sense strand comprises 1, 2, or 3 Tm-increasing nucleotides. In some aspects, the sense strand comprises a Tm-increasing nucleotide at (i) positions 1 and 10, or (ii) positions 1, 10 and 11, numbered 5′ to 3′. In some aspects, the Tm-increasing nucleotide is a bicyclic nucleotide, optionally a locked nucleic acid (LNA). In some aspects, the region of complementarity is fully complementary to the mRNA target sequence. In some aspects, the region of complementarity is partially complementary to the mRNA target sequence. In some aspects, the region of complementarity comprises no more than four mismatches to the mRNA target sequence. In some aspects, the mRNA target sequence is a liver target sequence. In some aspects, the mRNA target sequence is a hepatocyte target sequence. In some aspects, the mRNA target sequence is a liver sinusoidal endothelial cell mRNA target sequence. In some aspects, the mRNA target sequence is a macrophage mRNA target sequence, optionally a liver macrophage mRNA target sequence.

[0057] In yet further aspects, the disclosure provides a double-stranded oligonucleotide comprising an antisense strand of 22 nucleotides in length and a sense strand of 13 nucleotides in length, wherein the antisense and sense strands form a duplex region of 13 base pairs, wherein the antisense strand comprises an orientation of 5′ to 3′, wherein the antisense strand comprises a 5′ overhang comprising two nucleotides and a 3′ overhang comprising seven nucleotides, wherein the antisense strand comprises a region of complementarity to a macrophage mRNA target sequence, wherein the sense strand comprises at least one lipid moiety conjugated to a nucleotide at position 2 of the sense strand, wherein the sense strand comprises a Tm-increasing nucleotide at positions 1, and 11, wherein the sense strand comprises a 2′-fluoro modification at positions 3-6 and a 2-O-methyl modification at positions 7-10 and 12-13, wherein the sense strand comprises phosphorothioate linkages between positions 1 and 2, positions 11 and 12, and positions 12 and 13, wherein the antisense strand comprises a 2′-fluoro modification at positions 2-5, 7, 10 and 14 and a 2-O-methyl modification at positions 1, 6, 8, 9, 11-13, and 15-22, wherein the antisense strand comprises phosphorothioate linkages between positions 1 and 2, positions 2 and 3, positions 3 and 4, positions 20 and 21, and positions 21 and 22, and wherein the antisense strand comprises a 5′ terminal phosphorylated uridine.

[0058] In some aspects, the disclosure provides a double-stranded oligonucleotide comprising an antisense strand of 22 nucleotides in length and a sense strand of 13 nucleotides in length, wherein the antisense and sense strands form a duplex region of 13 base pairs, wherein the antisense strand comprises an orientation of 5′ to 3′, wherein the antisense strand comprises a 5′ overhang comprising two nucleotides and a 3′ overhang comprising seven nucleotides, wherein the antisense strand comprises a region of complementarity to a macrophage mRNA target sequence, wherein the sense strand comprises at least one lipid moiety conjugated to a nucleotide at position 2 of the sense strand, wherein the sense strand comprises a Tm-increasing nucleotide at positions 1, 10, and 11, wherein the sense strand comprises a 2′-fluoro modification at positions 3-6 and a 2-O-methyl modification at positions 7-19 and 12-13, wherein the sense strand comprises phosphorothioate linkages between positions 1 and 2, positions 11 and 12, and positions 12 and 13, wherein the antisense strand comprises a 2′-fluoro modification at positions 2-5, 7, 10 and 14 and a 2-O-methyl modification at positions 1, 6, 8, 9, 11-13, and 15-22, wherein the antisense strand comprises phosphorothioate linkages between positions 1 and 2, positions 2 and 3, positions 3 and 4, positions 20 and 21, and positions 21 and 22, and wherein the antisense strand comprises a 5′ terminal phosphorylated uridine.

[0059] In some aspects, the disclosure provides a double-stranded oligonucleotide comprising an antisense strand of 22 nucleotides in length and a sense strand of 12 nucleotides in length, wherein the antisense and sense strands form a duplex region of 12 base pairs, wherein the antisense strand comprises an orientation of 5′ to 3′, wherein the antisense strand comprises a 5′ overhang comprising at least two nucleotides and a 3′ overhang comprising at least seven nucleotides, wherein the antisense strand comprises a region of complementarity to an mRNA target sequence, wherein the sense strand comprises at least one lipid moiety conjugated to a 5′ terminal nucleotide of the sense strand, and wherein each of the antisense and sense strands comprise at least one 2′-modified nucleotide and at least one modified internucleotide linkage. In some aspects, the sense strand comprises a 2′-fluoro modification at positions 3-6 or 4-7, numbered 5′ to 3′. In some aspects, the at least one modified internucleotide linkage is a phosphorothioate linkage. In some aspects, the sense strand comprises phosphorothioate linkages between nucleotides at positions 1 and 2, 10 and 11, and 11 and 12, numbered 5′ to 3′. In some aspects, the antisense strand comprises phosphorothioate linkages between nucleotides at positions 1 and 2, 2 and 3, 3 and 4, 12 and 14, 14 and 15, 20 and 21, and 21 and 22, numbered 5′ to 3′. In some aspects, the 5′ overhang is 2 nucleotides and the 3′ overhang is 8 nucleotides. In some aspects, the 5′ overhang is 3 nucleotides and the 3′ overhang is 7 nucleotides. In some aspects, the oligonucleotide comprises (i) 1-3 or 1-2 Tm-increasing nucleotides, or (ii) 1, 2 or 3 Tm-increasing nucleotides. In some aspects, the sense strand comprises a Tm-increasing nucleotide at (i) positions 2, 10 and 11, or (ii) positions 2, 11 and 12, numbered 5′ to 3′. In some aspects, the Tm-increasing nucleotide is a bicyclic nucleotide, optionally a locked nucleic acid (LNA).

[0060] In other aspects, the disclosure provides a double-stranded oligonucleotide comprising an antisense strand of 22 nucleotides in length and a sense strand of 10 nucleotides in length, wherein the antisense and sense strands form a duplex region of 10 base pairs, wherein the antisense strand comprises an orientation of 5′ to 3′, wherein the antisense strand comprises a 5′ overhang comprising one nucleotide and a 3′ overhang comprising eleven nucleotides, wherein the antisense strand comprises a region of complementarity to an mRNA target sequence, wherein the sense strand comprises at least one lipid moiety conjugated to a 5′ terminal nucleotide of the sense strand, and wherein each of the antisense and sense strands comprise at least one 2′-modified nucleotide and at least one modified internucleotide linkage. In some aspects, the at least one modified internucleotide linkage is a phosphorothioate linkage. In some aspects, the sense strand comprises phosphorothioate linkages between nucleotides at positions 1 and 2, 8 and 9, and 9 and 10, numbered 5′ to 3′. In some aspects, the antisense strand comprises phosphorothioate linkages between nucleotides at positions 1 and 2, 2 and 3, 3 and 4, 12 and 14, 14 and 15, 20 and 21, and 21 and 22, numbered 5′ to 3′. In some aspects, the oligonucleotide comprises (i) 1-3 Tm-increasing nucleotides, or (ii) 1, 2 or 3 Tm-increasing nucleotides. In some aspects, the sense strand comprises a Tm-increasing nucleotide at positions 2, 6 and 7. In some aspects, the Tm-increasing nucleotide is a bicyclic nucleotide, optionally a locked nucleic acid (LNA).

[0061] In any of the foregoing or related aspects, the antisense strand comprises a 2′-fluoro modification at positions 2-5, 7, 10 and 14, numbered 5′ to 3′. In some aspects, the remaining nucleotides comprise a 2′-O-methyl modification, provided that the nucleotide of the sense strand conjugated to the at least one lipid moiety does not comprise a 2′-O-methyl modification

[0062] In any of the foregoing or related aspects, the oligonucleotide is a Dicer substrate. In some aspects, the oligonucleotide reduces expression of the mRNA target sequence in a cell or population of cells in vitro and/or in vivo.

[0063] In some aspects, the disclosure provides a pharmaceutical composition comprising an oligonucleotide described herein, and a pharmaceutically acceptable carrier, delivery agent or excipient.

[0064] In other aspects, the disclosure provides a method for treating a subject having a disease, disorder or condition associated with expression of a target mRNA, the method comprising administering to the subject a therapeutically effective amount of an oligonucleotide or pharmaceutical composition described herein. In some aspects, the target mRNA is expressed in the central nervous system, optionally wherein the central nervous system comprises the frontal cortex, hippocampus, medulla, cerebellum, lumbar dorsal root ganglion, and/or lumbar spinal cord. In some aspects, the target mRNA is expressed in a neuron of the central nervous system. In some aspects, the target mRNA is expressed in a macrophage. In some aspects, the macrophage is in the liver. In some aspects, the target mRNA is expressed in the liver. In some aspects, the target mRNA is expressed in a hepatocyte. In some aspects, the target mRNA is expressed in a liver sinusoidal endothelial cell. In some aspects, the target mRNA is expressed in ocular tissue. In some aspects, the target mRNA is expressed in a tissue of the central nervous system, liver tissue, ocular tissue, adipose tissue, muscle tissue, adrenal tissue, cardiac tissue, lung tissue, or any combination thereof.

[0065] In some aspects, the disclosure provides a method for treating a subject having a disease, disorder or condition associated with expression of an mRNA of the central nervous system, the method comprising administering to the subject a therapeutically effective amount of an oligonucleotide or pharmaceutical composition described herein, optionally wherein the central nervous system comprises the frontal cortex, hippocampus, medulla, cerebellum, lumbar dorsal root ganglion, and/or lumbar spinal cord. In some aspects, the mRNA of the central nervous system is a neuronal mRNA.

[0066] In other aspects, the disclosure provides a method for treating a subject having a disease, disorder or condition associated with expression of an mRNA of the liver, the method comprising administering to the subject a therapeutically effective amount of an oligonucleotide or pharmaceutical composition described herein.

[0067] In further aspects, the disclosure provides a method for treating a subject having a disease, disorder or condition associated with expression of an ocular mRNA, the method comprising administering to the subject a therapeutically effective amount of an oligonucleotide or pharmaceutical composition described herein.

[0068] In yet further aspects, the disclosure provides a method for treating a subject having a disease, disorder or condition associated with expression of a macrophage mRNA, the method comprising administering to the subject a therapeutically effective amount of an oligonucleotide or pharmaceutical composition described herein. In some aspects, the macrophage mRNA is expressed in the liver.

[0069] In some aspects, the disclosure provides a method of delivering an oligonucleotide to a cell or population of cells in the central nervous system, liver tissue or ocular tissue, the method comprising administering a pharmaceutical composition described herein.

[0070] In further aspects, the disclosure provides a method of reducing expression of a target mRNA in a subject, comprising administering to the subject an oligonucleotide or pharmaceutical composition described herein. In some aspects, the target mRNA is expressed in the central nervous system, optionally wherein the central nervous system comprises the frontal cortex, hippocampus, medulla, cerebellum, lumbar dorsal root ganglion, and/or lumbar spinal cord. In some aspects, the target mRNA is expressed in a neuron of the central nervous system. In some aspects, the target mRNA is expressed in the liver. In some aspects, the target mRNA is expressed in a hepatocyte. In some aspects, the target mRNA is expressed in a liver sinusoidal endothelial cell. In some aspects, the target mRNA is expressed in a macrophage. In some aspects, the macrophage is in the liver. In some aspects, the target mRNA is expressed in ocular tissue.

[0071] In other aspects, the disclosure provides a kit comprising an oligonucleotide described herein, an optional pharmaceutically acceptable carrier, and a package insert comprising instructions for administration to a subject having a disease, disorder or condition associated with the overexpression of a target mRNA. In further aspects, the disclosure provides a kit comprising an oligonucleotide described herein, an optional pharmaceutically acceptable carrier, and a package insert comprising instructions for administration to a subject having a disease, disorder or condition associated with the reduction in expression of a target mRNA.

[0072] In some aspects, the disclosure provides use of an oligonucleotide or pharmaceutical composition described herein, in the manufacture of a medicament for the treatment of a disease, disorder, or condition associated with the reduction in the expression of a target mRNA. In other aspects, the disclosure provides use of an oligonucleotide or pharmaceutical composition described herein, in the manufacture of a medicament for the treatment of a disease, disorder, or condition associated with the overexpression of a target mRNA. In further aspects, the disclosure provides an oligonucleotide or pharmaceutical composition described herein, for use, or adaptable for use, in the treatment of a disease, disorder, or condition associated with expression of a target mRNA.

[0073] In any of the foregoing or related aspects, the target mRNA is expressed in the central nervous system, a neuron of the central system, the liver, a macrophage, optionally a macrophage in the liver, ocular tissue, or any combination thereof, optionally wherein the central nervous system comprises the frontal cortex, hippocampus, medulla, cerebellum, lumbar dorsal root ganglion, and/or lumbar spinal cord.

[0074] In some aspects, the disclosure provides a method of activating target-specific RNA interference (RNAi) in an organism comprising administering to said organism an oligonucleotide described herein, said oligonucleotide being administered in an amount sufficient for degradation of the target mRNA to occur, thereby activating target-specific RNAi in the organism. In some aspects, the target mRNA specifies the amino acid sequence of a protein involved or predicted to be involved in a human disease or disorder. In some aspects, the disease or disorder is selected from the group consisting of viral infections, bacterial infections, parasitic infections, cancers, allergies, autoimmune diseases, immunodeficiencies, and immunosuppression.

[0075] In some aspects, the disclosure provides a double-stranded oligonucleotide comprising an antisense strand of about 15-30 nucleotides in length and a sense strand of about 15-50 nucleotides in length, wherein the antisense and sense strands form a duplex region of about 15-30 base pairs, wherein the antisense strand comprises a region of complementarity to a mRNA target sequence, wherein the sense strand comprises (i) at least one lipid moiety conjugated to a nucleotide of the sense strand, and (ii) a stem-loop, wherein the stem-loop comprises a nucleotide sequence represented by the formula: 5′-S1-L-S2-3′, wherein S1 is complementary to S2, and wherein L forms a loop between S1 and S2, and wherein the sense and antisense strands each comprise an orientation of 5′ to 3′, and wherein the stem-loop is at the 5′ end of the sense strand.

[0076] In any of the foregoing or related aspects, the oligonucleotide comprises a blunt end. In some aspects, the blunt end comprises the 3′ end of the sense strand and the 5′ end of the antisense strand.

[0077] In some aspects, the oligonucleotide comprises an overhang of at least two nucleotides. In some aspects, the overhang comprises the 5′ end of the antisense strand.

[0078] In some aspects, the sense strand is about 28-38 nucleotides. In some aspects, the antisense strand is 22 nucleotides. In some aspects, the lipid moiety is conjugated to a nucleotide comprising the loop.

[0079] In any of the foregoing or related aspects,
[0080] (i) the sense strand is 28 nucleotides, and the lipid moiety is conjugated to a nucleotide at position 4, positions numbered 5′ to 3′;
[0081] (ii) the sense strand is 30 nucleotides, and the lipid moiety is conjugated to a nucleotide at position 4, positions numbered 5′ to 3′;
[0082] (iii) the sense strand is 34 nucleotides, and the lipid moiety is conjugated to a nucleotide at position 6 or position 15, positions numbered 5′ to 3′; or
[0083] (iv) the sense strand is 38 nucleotides, and the lipid moiety is conjugated to a nucleotide at position 8, positions numbered 5′ to 3′.

[0084] In any of the foregoing or related aspects, the lipid moiety is selected from:

[chemical structure]

[0085] In some aspects, the lipid moiety is a hydrocarbon chain. In some aspects, the hydrocarbon chain is a C8-C30 hydrocarbon chain. In some aspects, the hydrocarbon chain is a C16 hydrocarbon chain. In some aspects, the C16 hydrocarbon chain is represented by

[chemical structure]

[0086] In any of the foregoing or related aspects, the lipid moiety is conjugated to the 2′ carbon of the ribose ring of the nucleotide.

[0087] In any of the foregoing or related aspects, the region of complementarity is fully complementary to the mRNA target sequence. In other aspects, the region of complementarity is partially complementary to the mRNA target sequence. In some aspects, the region of complementarity comprises no more than four mismatches to the mRNA target sequence.

[0088] In any of the foregoing or related aspects, the mRNA target sequence is a central nervous system (CNS) target sequence, optionally a neuronal mRNA target sequence or an ocular mRNA target sequence. In some aspects, the mRNA target sequence is an ocular mRNA target sequence.

[0089] In any of the foregoing or related aspects, the loop sequence is 5′-GAAA-3′. In some aspects, the loop sequence is 5′-UNCG-3′, wherein N is any nucleotide. In some aspects, the loop sequence is 5′-UACG-3′.

[0090] In any of the foregoing or related aspects, the oligonucleotide comprises at least one modified nucleotide. In some aspects, the modified nucleotide comprises a 2′-modification. In some aspects, each of the nucleotides of the sense strand and the antisense strand comprise a 2′-modification. In some aspects, the 2′-modification is a modification selected from 2′-aminoethyl, 2′-fluoro, 2′-O-methyl, 2′-O-methoxyethyl, and 2′-deoxy-2′-fluoro-β-d-arabinonucleic acid. In some aspects, the antisense strand comprises 22 nucleotides with positions 1-22 from 5′ to 3′, and wherein each of positions 2, 3, 4, 5, 7, 10 and 14 comprise a 2′-fluoro modification. In some aspects,
[0091] (i) the sense strand is 38 nucleotides with positions 1-38 from 5′ to 3′, and wherein each of positions 26-29 comprise a 2′-fluoro modification;
[0092] (ii) the sense strand is 34 nucleotides with positions 1-34 from 5′ to 3′, and wherein each of positions 22-25 comprise a 2′-fluoro modification;
[0093] (iii) the sense strand is 30 nucleotides with positions 1-30 from 5′ to 3′, and wherein each of positions 18-21 comprise a 2′-fluoro modification; or
[0094] (iv) the sense strand is 28 nucleotides with positions 1-28 from 5′ to 3′, and wherein each of positions 18-21 comprise a 2′-fluoro modification.

[0095] In any of the foregoing or related aspects, comprises at least one modified internucleotide linkage. In some aspects, the at least one modified internucleotide linkage is a phosphorothioate linkage. In some aspects, the antisense strand comprises a phosphorothioate linkage (i) between positions 1 and 2, and between positions 2 and 3; or (ii) between positions 1 and 2, between positions 2 and 3, and between positions 3 and 4, wherein positions are numbered 1-4 from 5′ to 3′. In some aspects, the antisense strand is 22 nucleotides in length, and wherein the antisense strand comprises a phosphorothioate linkage between positions 20 and 21 and between positions 21 and 22, wherein positions are numbered 1-22 from 5′ to 3′. In some aspects, the sense strand comprises a phosphorothioate linkage between the penultimate nucleotide and third nucleotide from the 3′ end, and between the penultimate nucleotide and ultimate nucleotide. In some aspects,
[0096] (i) the sense strand is 38 nucleotides with positions 1-38 from 5′ to 3′, and wherein the sense strand comprises a phosphorothioate linkage between positions 36 and 37, and 37 and 38;
[0097] (ii) the sense strand is 34 nucleotides with positions 1-34 from 5′ to 3′, and wherein the sense strand comprises a phosphorothioate linkage between positions 32 and 33, and 33 and 34;
[0098] (iii) the sense strand is 30 nucleotides with positions 1-30 from 5′ to 3′, and wherein the sense strand comprises a phosphorothioate linkage between positions 28 and 29, and 29 and 30; or
[0099] (iv) the sense strand is 28 nucleotides with positions 1-28 from 5′ to 3′, and wherein the sense strand comprises a phosphorothioate linkage between positions 26 and 27, and 27 and 28.

[0100] In any of the foregoing or related aspects, the antisense strand comprises a phosphorylated nucleotide at the 5′ terminus, wherein the phosphorylated nucleotide is selected from uridine and adenosine. In some aspects, the phosphorylated nucleotide is uridine. In some aspects, the 4′-carbon of the sugar of the 5′-nucleotide of the antisense strand comprises a phosphate analog. In some aspects, the phosphate analog is oxymethyl phosphonate, vinyl phosphonate or malonyl phosphonate. In some aspects, the phosphorylated nucleotide is 4′-O-monomethylphosphonate-2′-O-methyl uridine.

[0101] In any of the foregoing or related aspects, the sense strand comprises at least one Tm-increasing nucleotide. In some aspects, the sense strand comprises 1-6, 1-5, 1-4, 1-3 or 12 Tm-increasing nucleotides. In some aspects, the sense strand comprises 1, 2, 3, 4, 5 or 6 Tm-increasing nucleotides. In some aspects, the sense strand comprises up to six Tm-increasing nucleotides. In some aspects, the Tm-increasing nucleotide is a bicyclic nucleotide. In some aspects, the Tm-increasing nucleotide is a locked nucleic acid.

[0102] In any of the foregoing or related aspects, S1 and S2 each comprise 1-6 nucleotides. In some aspects, S1 and S2 each comprise 4 nucleotides. In some aspects, S1 and S2 each comprise 2 nucleotides. In some aspects, S1 and S2 each comprise at least one Tm-increasing nucleotide. In some aspects, S1 and S2 are each 4 nucleotides, wherein 1-3 nucleotides of each S1 and S2 are Tm-increasing nucleotides.

[0103] In any of the foregoing or related aspects, the remaining nucleotides comprise a 2′-O-methyl modification, provided that the nucleotide of the sense strand conjugated to the at least one lipid moiety does not comprise a 2′-O-methyl modification.

[0104] In some aspects, the disclosure provides, a double-stranded oligonucleotide comprising an antisense strand of about 20-22 nucleotides in length and a sense strand of about 32-34 nucleotides in length, wherein the antisense and sense strands form a duplex region of about 20-22 base pairs and the oligonucleotide is blunt ended, wherein the antisense strand comprises a region of complementarity to a mRNA target sequence, wherein the sense strand comprises (i) a stem-loop, wherein the stem-loop comprises a nucleotide sequence represented by the formula: 5′-S1-L-S2-3′, wherein S1 is complementary to S2, and wherein L forms a loop between S1 and S2, and (ii) at least one lipid moiety conjugated to a nucleotide of the loop, wherein the sense and antisense strands each comprise an orientation of 5′ to 3′, wherein the stem-loop is at the 5′ end of the sense strand, and wherein each of the antisense and sense strands comprise at least one 2′-modified nucleotide and at least one modified internucleotide linkage.

[0105] In some aspects, the sense strand is 34 nucleotides and comprises a 2′-fluoro modification at positions 22-25, numbered 5′ to 3′. In some aspects, the antisense strand is 22 nucleotides and comprises a 2′-fluoro modification at positions 2-5, 7, 10 and 14, numbered 5′ to 3′. In some aspects, the remaining nucleotides comprise a 2′-O-methyl modification, provided that the nucleotide of the sense strand conjugated to the at least one lipid moiety does not comprise a 2′-O-methyl modification. In some aspects, the at least one modified internucleotide linkage is a phosphorothioate linkage. In some aspects, the sense strand is 34 nucleotides and comprises phosphorothioate linkages between nucleotides at positions 1 and 2, 2 and 3, 32 and 33, and 33 and 34, numbered 5′ to 3′. In some aspects, the antisense strand is 22 nucleotides and comprises phosphorothioate linkages between nucleotides at positions 1 and 2, 2 and 3, 3 and 4, 20 and 21, and 21 and 22, numbered 5′ to 3′. In some aspects, the antisense strand comprises a phosphorylated uridine at position 1, numbered 5′ to 3′. In some aspects, the phosphorylated uridine is 4′-O-monomethylphosphonae-2′-O-methyl uridine. In some aspects, the lipid moiety is a C16 hydrocarbon represented by:

[chemical structure]

[0106] In some aspects, the lipid moiety is conjugated to the 2′ carbon of the ribose ring of the nucleotide. In some aspects, the lipid moiety is conjugated to a nucleotide at position 6 of the sense strand, numbered 5′ to 3′. In some aspects, S1 and S2 each comprise 1-6 nucleotides. In some aspects, S1 and S2 are each 4 nucleotides. In some aspects, L is 4 nucleotides. In some aspects, L comprises the sequence 5′-GAAA-3′. In some aspects, the region of complementarity is fully complementary to the mRNA target sequence. In other aspects, wherein the region of complementarity is partially complementary to the mRNA target sequence. In some aspects, the region of complementarity comprises no more than four mismatches to the mRNA target sequence. In some aspects, the mRNA target sequence is a central nervous system (CNS) target sequence, optionally a neuronal mRNA target sequence or an ocular mRNA target sequence.

[0107] In some aspects, the disclosure provides, a double-stranded oligonucleotide comprising an antisense strand of 22 nucleotides in length and a sense strand of 34 nucleotides in length, wherein the antisense and sense strands form a duplex region of 22 base pairs and the oligonucleotide is blunt ended, wherein the antisense strand comprises a region of complementarity to a central nervous system mRNA target sequence, wherein the sense strand comprises (i) a stem-loop, wherein the stem-loop comprises a nucleotide sequence represented by the formula: 5′-S1-L-S2-3′, wherein S1 is complementary to S2, wherein S1 and S2 each comprise 4 nucleotides, wherein L forms a loop between S1 and S2, and wherein L comprises four nucleotides, and (ii) at least one lipid moiety conjugated to a nucleotide of the loop, wherein the sense and antisense strands each comprise an orientation of 5′ to 3′, wherein the stem-loop is at the 5′ end of the sense strand, wherein the sense strand comprises a 2′-fluoro modification at positions 22-25 and a 2′-O-methyl modification at positions 1-5, 7-21 and 26-34, wherein the antisense strand comprises a 2′-fluoro modification at positions 2-5, 7, 10 and 14 and a 2-O-methyl modification at positions 1, 6, 8, 9, 11-13, and 15-22, wherein the sense strand comprises phosphorothioate linkages between positions 1 and 2, 2 and 3, 32 and 33, and 33 and 34, and wherein the antisense strand comprises phosphorothioate linkages between positions 1 and 2, 2 and 3, 3 and 4, 20 and 21, and 21 and 22.

[0108] In some aspects, the disclosure provides a double-stranded oligonucleotide comprising an antisense strand of about 20-22 nucleotides in length and a sense strand of about 26-28 nucleotides in length, wherein the antisense and sense strands form an asymmetric duplex region of about 20-22 base pairs comprising a 3′ terminal overhang of at least 2 nucleotides of the antisense strand, wherein the antisense strand comprises a region of complementarity to a mRNA target sequence, wherein the sense strand comprises: (i) a stem-loop, wherein the stem-loop comprises a nucleotide sequence represented by the formula: 5′-S1-L-S2-3′, wherein S1 is complementary to S2, wherein L forms a loop between S1 and S2 and comprises the sequence UNCG, and wherein S1 and S2 each comprise at least one Tm-increasing nucleotide, and (ii) at least one lipid moiety conjugated to a nucleotide of the loop, wherein the sense strand comprises an orientation of 5′ to 3′, wherein the stem-loop is at the 5′ end of the sense strand, and wherein each of the antisense and sense strands comprise at least one 2′-modified nucleotide and at least one modified internucleotide linkage.

[0109] In some aspects, the sense strand is 28 nucleotides and comprises a 2′-fluoro modification at positions 18-21, numbered 5′ to 3′. In some aspects, the antisense strand is 22 nucleotides and comprises a 2′-fluoro modification at positions 2-5, 7, 10 and 14, numbered 5′ to 3′. In some aspects, the at least one modified internucleotide linkage is a phosphorothioate linkage. In some aspects, the sense strand is 28 nucleotides and comprises phosphorothioate linkages between nucleotides at positions 26 and 27, and 27 and 28, numbered 5′ to 3′. In some aspects, the antisense strand is 22 nucleotides and comprises phosphorothioate linkages between nucleotides at positions 1 and 2, 2 and 3, 3 and 4, 20 and 21, and 21 and 22, numbered 5′ to 3′. In some aspects, the 3′ terminal overhang is 2 nucleotides. In some aspects, the antisense strand comprises a phosphorylated uridine at position 1, numbered 5′ to 3′. In some aspects, the phosphorylated uridine is 4′-O-monomethylphosphonae-2′-O-methyl uridine. In some aspects, the lipid moiety is a C16 hydrocarbon represented by:

[chemical structure]

[0110] In some aspects, the lipid moiety is conjugated to the 2′ carbon of the ribose ring of the nucleotide. In some aspects, the lipid moiety is conjugated to a nucleotide at position 4 of the sense strand, numbered 5′ to 3′. In some aspects, S1 and S2 each comprise 1-6 nucleotides. In some aspects, wherein S1 and S2 are each 2 nucleotides. In some aspects, S1 and S2 each comprise one Tm-increasing nucleotide. In some aspects, the Tm-increasing nucleotide is a bicyclic nucleotide. In some aspects, Tm-increasing nucleotide is a locked nucleic acid (LNA). In some aspects, the remaining nucleotides comprise a 2′-O-methyl modification, provided that the nucleotide of the sense strand conjugated to the at least one lipid moiety does not comprise a 2′-O-methyl modification. In some aspects, L is 4 nucleotides. In some aspects, L comprises the sequence 5′-UNCG-3′, wherein N is any nucleotide. In some aspects, L comprises the sequence 5′-UACG-3. In some aspects, the region of complementarity is fully complementary to the mRNA target sequence. In some aspects, the region of complementarity is partially complementary to the mRNA target sequence. In some aspects, the region of complementarity comprises no more than four mismatches to the mRNA target sequence. In some aspects, the mRNA target sequence is a central nervous system (CNS) target sequence, optionally a neuronal mRNA target sequence or an ocular mRNA target sequence.

[0111] In some aspects, the disclosure provides a double-stranded oligonucleotide comprising an antisense strand of 22 nucleotides in length and a sense strand of 28 nucleotides in length, wherein the antisense and sense strands form an asymmetric duplex region of 22 base pairs comprising a 3′ terminal overhang of 2 nucleotides of the antisense strand, wherein the antisense strand comprises a region of complementarity to a central nervous system mRNA target sequence, wherein the sense strand comprises: (i) a stem-loop, wherein the stem-loop comprises a nucleotide sequence represented by the formula: 5′-S1-L-S2-3′, wherein S1 is complementary to S2, wherein S1 and S2 each comprise 2 nucleotides, wherein L forms a loop between S1 and S2 and comprises the sequence UNCG, and wherein S1 and S2 each comprise at least one Tm-increasing nucleotide, and (ii) at least one lipid moiety conjugated to a nucleotide of the loop, wherein the sense strand comprises an orientation of 5′ to 3′, wherein the stem-loop is at the 5′ end of the sense strand, wherein the sense strand comprises a 2′-fluoro modification at positions 18-21 and a 2′-O-methyl modification at positions 2-3, 5-7, 9-17 and 22-28, wherein the antisense strand comprises a 2′-fluoro modification at positions 2-5, 7, 10 and 14 and a 2-O-methyl modification at positions 1, 6, 8, 9, 11-13, and 15-22, wherein the sense strand comprises phosphorothioate linkages between positions 26 and 27, and 27 and 28, and wherein the antisense strand comprises phosphorothioate linkages between positions 1 and 2, 2 and 3, 3 and 4, 20 and 21, and 21 and 22.

[0112] In some aspects, the disclosure provides a double-stranded oligonucleotide comprising an antisense strand of about 20-22 nucleotides in length and a sense strand of about 32-34 nucleotides in length, wherein the antisense and sense strands form a duplex region of about 20-22 base pairs, and the oligonucleotide is blunt ended, wherein the antisense strand comprises a region of complementarity to a mRNA target sequence, wherein the sense strand comprises: (i) a stem-loop, wherein the stem-loop comprises a nucleotide sequence represented by the formula: 5′-S1-L-S2-3′, wherein S1 is complementary to S2, wherein L forms a loop between S1 and S2, and wherein S1 and S2 each comprise at least one Tm-increasing nucleotide, and (ii) at least one lipid moiety conjugated to a nucleotide of the loop, wherein the sense strand comprises an orientation of 5′ to 3′, wherein the stem-loop is at the 5′ end of the sense strand, and wherein each of the antisense and sense strands comprise at least one 2′-modified nucleotide and at least one modified internucleotide linkage.

[0113] In some aspects, the sense strand is 34 nucleotides and comprises a 2′-fluoro modification at positions 22-25, numbered 5′ to 3′. In some aspects, antisense strand is 22 nucleotides and comprises a 2′-fluoro modification at positions 2-5, 7, 10 and 14, numbered 5′ to 3′. In some aspects, the at least one modified internucleotide linkage is a phosphorothioate linkage. In some aspects, the sense strand is 34 nucleotides and comprises phosphorothioate linkages between nucleotides at positions 32 and 33, and 33 and 34, numbered 5′ to 3′. In some aspects, the antisense strand is 22 nucleotides and comprises phosphorothioate linkages between nucleotides at positions 1 and 2, 2 and 3, 3 and 4, 20 and 21, and 21 and 22, numbered 5′ to 3′. In some aspects, the oligonucleotide comprises a blunt end comprising the 5′ end of the antisense strand and the 3′ end of the sense strand. In some aspects, the antisense strand comprises a phosphorylated uridine at position 1, numbered 5′ to 3′. In some aspects, the phosphorylated uridine is 4′-O-monomethylphosphonae-2′-O-methyl uridine. In some aspects, the lipid moiety is a C16 hydrocarbon represented by:

[chemical structure]

[0114] In some aspects, the lipid moiety is conjugated to the 2′ carbon of the ribose ring of the nucleotide. In some aspects, the lipid moiety is conjugated to a nucleotide at position 6 of the sense strand, numbered 5′ to 3′. In some aspects, S1 and S2 each comprise 1-6 nucleotides. In some aspects, S1 and S2 are each 4 nucleotides. In some aspects, S1 and S2 each comprise one Tm-increasing nucleotide. some aspects, the Tm-increasing nucleotide is a bicyclic nucleotide. In some aspects, the Tm-increasing nucleotide is a locked nucleic acid (LNA). In some aspects, the remaining nucleotides comprise a 2′-O-methyl modification, provided that the nucleotide of the sense strand conjugated to the at least one lipid moiety does not comprise a 2′-O-methyl modification. In some aspects, L is 4 nucleotides. In some aspects, L comprises the sequence 5′-GAAA-3′. In some aspects, the region of complementarity is fully complementary to the mRNA target sequence. In some aspects, the region of complementarity is partially complementary to the mRNA target sequence. In some aspects, the region of complementarity comprises no more than four mismatches to the mRNA target sequence. In some aspects, the mRNA target sequence is (i) a central nervous system (CNS) mRNA target sequence, optionally a neuronal mRNA target sequence or an ocular mRNA target sequence; or (ii) an ocular tissue mRNA target sequence.

[0115] In some aspects, the disclosure provides a double-stranded oligonucleotide comprising an antisense strand of 22 nucleotides in length and a sense strand of 34 nucleotides in length, wherein the antisense and sense strands form a duplex region of 22 base pairs, and the oligonucleotide is blunt ended, wherein the antisense strand comprises a region of complementarity to a central nervous system mRNA target sequence, wherein the sense strand comprises: (i) a stem-loop, wherein the stem-loop comprises a nucleotide sequence represented by the formula: 5′-S1-L-S2-3′, wherein S1 is complementary to S2, wherein S1 and S2 each comprise 4 nucleotides, wherein L forms a loop between S1 and S2, wherein the loop comprises 4 nucleotides, and wherein S1 and S2 each comprise at least one Tm-increasing nucleotide, and (ii) at least one lipid moiety conjugated to a nucleotide of the loop, wherein the sense strand comprises an orientation of 5′ to 3′, wherein the stem-loop is at the 5′ end of the sense strand, wherein the sense strand comprises a 2′-fluoro modification at positions 22-25 and a 2′-O-methyl modification at positions 2-5, 7-11, 12-21 and 26-34, wherein the antisense strand comprises a 2′-fluoro modification at positions 2-5, 7, 10 and 14 and a 2-O-methyl modification at positions 1, 6, 8, 9, 11-13, and 15-22, wherein the sense strand comprises phosphorothioate linkages between positions 32 and 33, and 33 and 34, and wherein the antisense strand comprises phosphorothioate linkages between positions 1 and 2, 2 and 3, 3 and 4, 20 and 21, and 21 and 22.

[0116] In any of the foregoing or related aspects, the oligonucleotide is a Dicer substrate. In further aspects, the oligonucleotide reduces expression of the mRNA target sequence in a cell or population of cells in vitro and/or in vivo.

[0117] In some aspects, the disclosure provides a pharmaceutical composition comprising an oligonucleotide of any of the foregoing or related aspects, and a pharmaceutically acceptable carrier, delivery agent or excipient.

[0118] In some aspects, the disclosure provides a method for treating a subject having a disease, disorder or condition associated with expression of a target mRNA, the method comprising administering to the subject a therapeutically effective amount of an oligonucleotide or pharmaceutical composition described herein.

[0119] In some aspects of the methods described herein, the target mRNA is expressed in the central nervous system, optionally a neuron of the central nervous system. In some aspects of the methods described herein, the target mRNA is expressed in ocular tissue, optionally the optic nerve and/or retina.

[0120] In some aspects, the disclosure provides a method of delivering an oligonucleotide to a cell or population of cells in the central nervous system or ocular tissue, the method comprising administering a pharmaceutical composition described herein.

[0121] In some aspects, the disclosure provides a method of reducing expression of a target mRNA in a subject, comprising administering to the subject an oligonucleotide or pharmaceutical composition described herein.

[0122] In some aspects of the methods described herein, target mRNA is expressed in the central nervous system, optionally a neuron of the central nervous system. In some aspects of the methods described herein, the target mRNA is expressed in ocular tissue, optionally the optic nerve and/or retina.

[0123] In some aspects, the disclosure provides a kit comprising an oligonucleotide described herein, an optional pharmaceutically acceptable carrier, and a package insert comprising instructions for administration to a subject having a disease, disorder or condition associated with expression of a target mRNA.

[0124] In some aspects, the disclosure provides use of an oligonucleotide or pharmaceutical composition described herein, in the manufacture of a medicament for the treatment of a disease, disorder, or condition associated with expression of a target mRNA.

[0125] In some aspects, the disclosure provides any oligonucleotide or pharmaceutical composition described herein, for use, or adaptable for use, in the treatment of a disease, disorder, or condition associated with expression of a target mRNA.

[0126] In some aspects of the methods described herein, the target mRNA is expressed in the central nervous system and/or a neuron of the central nervous system. In some aspects, the target mRNA is expressed in ocular tissue, optionally the retina and/or optic nerve.

[0127] In any of the foregoing or related aspects of the methods described herein the central nervous system comprises the frontal cortex, the hippocampus, the cerebellum, the brainstem, lumbar dorsal root ganglion, the lumbar spinal cord, or combinations thereof.

[0128] In any of the foregoing or related aspects, the central nervous system comprises the frontal cortex, the hippocampus, the cerebellum, the brainstem, lumbar dorsal root ganglion, the lumbar spinal cord, or combinations thereof.

[0129] In some aspects, the disclosure provides a method of activating target-specific RNA interference (RNAi) in an organism comprising administering to said organism a dsRNA oligonucleotide described herein, said oligonucleotide being administered in an amount sufficient for degradation of the target mRNA to occur, thereby activating target-specific RNAi in the organism. In some aspects of, the target mRNA specifies the amino acid sequence of a protein involved or predicted to be involved in a human disease or disorder. In some aspects, the disease or disorder is selected from the group consisting of viral infections, bacterial infections, parasitic infections, cancers, allergies, autoimmune diseases, immunodeficiencies, and immunosuppression.

[0130] In some aspects, the disclosure provides a double-stranded oligonucleotide comprising an antisense strand of about 13-30 nucleotides in length and a sense strand of about 10-50 nucleotides in length, wherein the antisense and sense strands are separate strands which form an asymmetric duplex region having an overhang of about 2-10 nucleotides at the 3′ terminus of the antisense strand, wherein the duplex region is about 10-30 nucleotides, wherein the antisense strand comprises a region of complementarity to a mRNA target sequence, and wherein the sense strand comprises at least one lipid moiety conjugated to a nucleotide on the sense strand.

[0131] In some aspects, the disclosure provides a double-stranded oligonucleotide comprising an antisense strand of about 13-30 nucleotides in length and a sense strand of about 10-50 nucleotides in length, wherein the antisense and sense strands are separate strands which form an asymmetric duplex region having an overhang of about 2-12 nucleotides at the 3′ terminus of the antisense strand, wherein the duplex region is about 10-30 nucleotides, wherein the antisense strand comprises a region of complementarity to a mRNA target sequence, and wherein the sense strand comprises at least one lipid moiety conjugated to a nucleotide on the sense strand.

[0132] In some aspects, the oligonucleotide comprises a blunt end. In some aspects, the blunt end comprises the 3′ end of the sense strand and the 5′ end of the antisense strand.

[0133] In further aspects, the oligonucleotide comprises a stem loop, wherein the stem loop comprises a nucleotide sequence represented by the formula: 5′-S1-L-S2-3′, wherein S1 is complementary to S2, and wherein L forms a loop between S1 and S2, and wherein the sense strand comprises an orientation of 5′ to 3′, and wherein the stem-loop is at the 3′ end of the sense strand.

[0134] In any of the foregoing or related aspects,
[0135] (i) the sense strand is 19 nucleotides, the duplex region is 19 nucleotides, and the overhang is 3 nucleotides;
[0136] (ii) the sense strand is 18 nucleotides, the duplex region is 18 nucleotides, and the overhang is 4 nucleotides;
[0137] (iii) the sense strand is 17 nucleotides, the duplex region is 17 nucleotides, and the overhang is 5 nucleotides;
[0138] (iv) the sense strand is 16 nucleotides, the duplex region is 16 nucleotides, and the overhang is 6 nucleotides; or
[0139] (v) the sense strand is 15 nucleotides, the duplex region is 15 nucleotides, and the overhang is 7 nucleotides.

[0140] In some aspects,
[0141] (i) the sense strand is 19 nucleotides, the duplex region is 19 nucleotides, and the overhang is 3 nucleotides;
[0142] (ii) the sense strand is 18 nucleotides, the duplex region is 18 nucleotides, and the overhang is 4 nucleotides;
[0143] (iii) the sense strand is 17 nucleotides, the duplex region is 17 nucleotides, and the overhang is 5 nucleotides;
[0144] (iv) the sense strand is 16 nucleotides, the duplex region is 16 nucleotides, and the overhang is 6 nucleotides;
[0145] (v) the sense strand is 15 nucleotides, the duplex region is 15 nucleotides, and the overhang is 7 nucleotides;
[0146] (vi) the sense strand is 14 nucleotides, the duplex region is 14 nucleotides, and the overhang is 8 nucleotides;
[0147] (vii) the sense strand is 13 nucleotides, the duplex region is 13 nucleotides, and the overhang is 8 nucleotides; or
[0148] (viii) the sense strand is 12 nucleotides, the duplex region is 12 nucleotides, and the overhang is 10 nucleotides.

[0149] In some aspects, the sense strand is 10 nucleotides, the duplex region is 10 nucleotides, and the overhang is 12 nucleotides.

[0150] In some aspects,
[0151] (i) the sense strand is 32 nucleotides, the duplex region is 16 nucleotides, and the overhang is 6 nucleotides;
[0152] (ii) the sense strand is 30 nucleotides, the duplex region is 14 nucleotides, and the overhang is 8 nucleotides; or
[0153] (iii) the sense strand is 28 nucleotides, the duplex region is 12 nucleotides, and the overhang is 10 nucleotides.

[0154] In some aspects, the antisense strand is 22 nucleotides, with positions 1-22 numbered 5′ to 3′.

[0155] In some aspects, the lipid moiety is conjugated to a nucleotide of the sense strand that forms a base pair with a nucleotide at position 14 of the antisense strand. In some aspects, the lipid moiety is conjugated to a nucleotide of the sense strand that forms a base pair with a nucleotide at position 12 of the antisense strand. In some aspects, the lipid moiety is conjugated to a nucleotide of the sense strand that forms a base pair with a nucleotide at position 20, position 19, position 18, position 17, position 16, position 15, position 14, position 13, or position 12 of the antisense strand.

[0156] In further aspects, the lipid moiety is conjugated to a nucleotide in the loop. In some aspects, the lipid moiety is conjugated to the 3′ terminal nucleotide on the sense strand. In some aspects, the lipid moiety is conjugated to the 5′ terminal nucleotide on the sense strand.

[0157] In any of the foregoing or related aspects, the lipid moiety is selected from:

[chemical structure]

[0158] In some aspects, the lipid moiety is a hydrocarbon chain. In some aspects, the hydrocarbon chain is a C8-C30 hydrocarbon chain. In some aspects, the hydrocarbon chain is a C16 hydrocarbon chain. In some aspects, the C16 hydrocarbon chain is represented by

[chemical structure]

[0159] In some aspects, the hydrocarbon chain is a C22 hydrocarbon chain. In some aspects, the C22 hydrocarbon chain is represented by

[chemical structure]

[0160] In any of the foregoing or related aspects, the lipid moiety is conjugated to the 2′ carbon of the ribose ring of the nucleotide.

[0161] In any of the foregoing or related aspects, the region of complementarity is fully complementary to the mRNA target sequence. In some aspects, the region of complementarity is partially complementary to the mRNA target sequence. In some aspects, the region of complementarity comprises no more than four mismatches to the mRNA target sequence.

[0162] In any of the foregoing or related aspects, the mRNA target sequence is a liver mRNA target sequence, optionally a liver macrophage mRNA target sequence, a liver hepatocyte mRNA target sequence, or a liver sinusoidal endothelial cell mRNA target sequence. In some aspects, the mRNA target sequence is an ocular mRNA target sequence. In some aspects, the mRNA target sequence is expressed in liver tissue, skeletal muscle tissue, adipose tissue and/or adrenal tissue. In other aspects, the mRNA target sequence is expressed in at least one tissue of the central nervous system. In some aspects, the at least one tissue of the central nervous system is selected from frontal cortex, medulla, hippocampus, hypothalamus, cerebellum, lumbar spinal cord, lumbar dorsal root ganglion, and any combination thereof.

[0163] In any of the foregoing or related aspects, oligonucleotide comprises at least one modified nucleotide. In some aspects, the modified nucleotide comprises a 2′-modification. In some aspects, each of the nucleotides of the sense strand and the antisense strand comprise a 2′-modification. In some aspects, the 2′-modification is a modification selected from 2′-aminoethyl, 2′-fluoro, 2′-O-methyl, 2′-O-methoxyethyl, and 2′-deoxy-2′-fluoro-β-d-arabinonucleic acid. In some aspects, the antisense strand is 22 nucleotides with positions 1-22 numbered 5′ to 3′, and wherein the sense strand comprises a 2′-fluoro modification at each of nucleotides forming a base pair with nucleotides at positions 10-13 of the antisense strand. In some aspects, the antisense strand is 22 nucleotides with positions 1-22 numbered 5′ to 3′, and wherein the sense strand comprises a 2′-fluoro modification at each of nucleotides forming a base pair with nucleotides at positions 10, 11, 12, 13, or any combination thereof, of the antisense strand. In some aspects, the antisense strand comprises 22 nucleotides with positions 1-22 from 5′ to 3′, and wherein each of positions 2, 3, 4, 5, 7, 10 and 14 comprise a 2′-fluoro modification. In some aspects, the remaining nucleotides comprise a 2′-O-methyl modification, provided that the nucleotide of the sense strand conjugated to the at least one lipid moiety does not comprise a 2′-O-methyl modification.

[0164] In any of the foregoing or related aspects, the oligonucleotide comprises at least one modified internucleotide linkage. In some aspects, the at least one modified internucleotide linkage is a phosphorothioate linkage. In some aspects, the antisense strand comprises a phosphorothioate linkage (i) between positions 1 and 2, and between positions 2 and 3; or (ii) between positions 1 and 2, between positions 2 and 3, and between positions 3 and 4, wherein positions are numbered 1-4 from 5′ to 3′. In some aspects, the antisense strand is 22 nucleotides in length, and wherein the antisense strand comprises a phosphorothioate linkage between positions 20 and 21 and between positions 21 and 22, wherein positions are numbered 1-22 from 5′ to 3′. In some aspects, the antisense strand comprises a phosphorothioate linkage between positions 13 and 14 and between positions 14 and 15. In some aspects, the antisense strand comprises a phosphorothioate linkage between positions 16 and 17, between positions 17 and 18, between positions 18 and 19, and between positions 19 and 20. In some aspects, the antisense strand comprises a phosphorothioate linkage between positions 15 and 16, between positions 16 and 17, between positions 17 and 18, between positions 18 and 19, and between positions 19 and 20. In some aspects, the antisense strand comprises a phosphorothioate linkage between positions 12 and 13, between positions 15 and 16, between positions 16 and 17, between positions 17 and 18, between positions 18 and 19, and between positions 19 and 20. In some aspects, the sense strand comprises a phosphorothioate linkage between positions 1 and 2. In some aspects, the sense strand comprises a phosphorothioate linkage between positions 1 and 2, between the penultimate nucleotide and third nucleotide from the 3′ end, and between the penultimate nucleotide and ultimate nucleotide.

[0165] In any of the foregoing or related aspects, the antisense strand comprises a phosphorylated nucleotide at the 5′ terminus, wherein the phosphorylated nucleotide is selected from uridine and adenosine. In some aspects, the phosphorylated nucleotide is uridine. In some aspects, the 4′-carbon of the sugar of the 5′-nucleotide of the antisense strand comprises a phosphate analog. In some aspects, the phosphate analog is oxymethyl phosphonate, vinyl phosphonate or malonyl phosphonate. In some aspects, the phosphorylated nucleotide is 4′-O-monomethylphosphonate-2′-O-methyl uridine.

[0166] In any of the foregoing or related aspects, the sense strand comprises at least one Tm-increasing nucleotide. In some aspects, the sense strand comprises up to nine Tm-increasing nucleotides. In some aspects, the sense strand comprises 1-3 Tm-increasing nucleotides. In some aspects, S1 and S2 each comprise at least one Tm-increasing nucleotide. In some aspects, S1 and S2 are each 3 nucleotides, and each nucleotide is a Tm-increasing nucleotide. In some aspects, the sense strand comprises up to three Tm-increasing nucleotides at nucleotide positions, provided the nucleotide positions are not in the stem-loop. In some aspects, wherein the sense strand comprises up to five Tm-increasing nucleotides.

[0167] In any of the foregoing or related aspects, the Tm-increasing nucleotide is a bicyclic nucleotide. In some aspects, the Tm-increasing nucleotide is a locked nucleic acid. In some aspects, the sense strand is 20 nucleotides in length, wherein the nucleotides are numbered 1-20 5′ to 3′, and wherein the sense strand comprises a locked nucleic acid at a nucleotide located at:
[0168] (i) position 2;
[0169] (ii) position 2 and position 15;
[0170] (iii) position 2, position 15, and position 16;
[0171] (iv) position 2, position 15, position 16, and position 18; or,
[0172] (v) position 2, position 15, position 16, position 18, and position 19.

[0173] In some aspects, the sense strand is 16 nucleotides in length, wherein the nucleotides are numbered 1-16 5′ to 3′, and wherein the sense strand comprises a locked nucleic acid at a nucleotide located at:
[0174] (i) position 2;
[0175] (ii) position 2 and position 11;
[0176] (iii) position 2, position 11, and position 12;
[0177] (iv) position 2, position 11, position 12, and position 14; or,
[0178] (v) position 2, position 11, position 12, position 14, and position 15.

[0179] In some aspects, the sense strand is 14 nucleotides in length, wherein the nucleotides are numbered 1-14 5′ to 3, and wherein the sense strand comprises a locked nucleic acid at a nucleotide located at:
[0180] (i) position 2;
[0181] (ii) position 2 and position 9;
[0182] (iii) position 2, position 9, and position 10; or,
[0183] (iv) position 2, position 9, position 10, position 12, and position 13.

[0184] In some aspects, the sense strand is 12 nucleotides in length, wherein the nucleotides are numbered 1-12 5′ to 3′, and wherein the sense strand comprises a locked nucleic acid at a nucleotide located at:
[0185] (i) position 2;
[0186] (ii) position 2 and position 7;
[0187] (iii) position 2, position 7, and position 8;
[0188] (iv) position 2, position 7, position 8, and position 10;
[0189] (v) position 2, position 7, position 8, position 10, and position 11.

[0190] In some aspects, the sense strand comprises a locked nucleic acid at a nucleotide that forms a base pair with a nucleotide at a position of the antisense strand selected from:
[0191] (i) position 2;
[0192] (ii) position 3;
[0193] (iii) position 5;
[0194] (iv) position 6; and
[0195] (v) any combination of (i)-(iv).

[0196] In any of the foregoing or related aspects, the oligonucleotide is a Dicer substrate. In some aspects, the oligonucleotide reduces expression of the mRNA target sequence in a cell or population of cells in vitro and/or in vivo.

[0197] In some aspects, the disclosure provides a pharmaceutical composition comprising any oligonucleotide described herein, and a pharmaceutically acceptable carrier, delivery agent or excipient.

[0198] In some aspects, the disclosure provides a method of delivering an oligonucleotide to a cell or population of cells in the central nervous system, liver tissue, muscle tissue, adipose tissue, adrenal tissue and/or ocular tissue, the method comprising administering a pharmaceutical composition described herein.

[0199] In some aspects, the disclosure provides a method for treating a subject having a disease, disorder or condition associated with expression of a target mRNA, the method comprising administering to the subject a therapeutically effective amount of an oligonucleotide or pharmaceutical composition described herein.

[0200] In some aspects, the disclosure provides a method of reducing expression of a target mRNA in a subject, comprising administering to the subject an oligonucleotide or pharmaceutical composition described herein.

[0201] In some aspects of the methods described herein, the target mRNA is expressed in the liver. In some aspects, the target mRNA is expressed in a hepatocyte. In some aspects, the target mRNA is expressed in a liver sinusoidal endothelial cell. In some aspects of the methods described herein, the target mRNA is expressed in a macrophage of the liver. In some aspects, the target mRNA is expressed in at least one cell type of the central nervous system. In some aspects, the at least one cell type of the central nervous system is an astrocyte, a neuron, or an oligodendrocyte. In some aspects, the target mRNA is expressed in an astrocyte, a neuron, an oligodendrocyte, or any combination thereof. In some aspects, the target mRNA is expressed in the frontal cortex, medulla, hippocampus, hypothalamus, cerebellum, lumbar spinal cord, lumbar dorsal root ganglion, or any combination thereof. In some aspects of the methods described herein, the target mRNA is expressed in ocular tissue, optionally the retina or optic nerve. In some aspects of the methods described herein, the target mRNA is expressed in liver tissue, skeletal muscle tissue, adipose tissue and/or adrenal tissue.

[0202] In some aspects, the disclosure provides a kit comprising an oligonucleotide described herein, an optional pharmaceutically acceptable carrier, and a package insert comprising instructions for administration to a subject having a disease, disorder or condition associated with expression of a target mRNA.

[0203] In some aspects, the disclosure provides use of an oligonucleotide or pharmaceutical composition described herein in the manufacture of a medicament for the treatment of a disease, disorder, or condition associated with expression of a target mRNA.

[0204] In some aspects, the disclosure provides an oligonucleotide or pharmaceutical composition described herein, for use, or adaptable for use, in the treatment of a disease, disorder, or condition associated with expression of a target mRNA.

[0205] In any of the foregoing or related aspects, the target mRNA is expressed in the liver, optionally wherein the target mRNA is expressed in a liver macrophage, a liver hepatocyte, or a liver sinusoidal endothelial cell. In any of the foregoing or related aspects, the target mRNA is expressed in ocular tissue, optionally the retina or optic nerve. In any of the foregoing or related aspects, the target mRNA is expressed in liver tissue, skeletal muscle tissue, adipose tissue and/or adrenal tissue. In some aspects, the target mRNA is expressed in at least one tissue of the central nervous system. In some aspects, the at least one tissue of the central nervous system is selected from the frontal cortex, medulla, hippocampus, hypothalamus, cerebellum, lumbar spinal cord, lumbar dorsal root ganglion, and any combinations thereof.

[0206] In any of the foregoing or related aspects of the methods described herein, the disease or disorder is selected from the group consisting of viral infections, bacterial infections, parasitic infections, cancers, allergies, autoimmune diseases, immunodeficiencies, and immunosuppression.

[0207] In some aspects, the disclosure provides a double-stranded oligonucleotide comprising:
[0208] (i) a sense strand 14-20 nucleotides in length, wherein the sense strand comprises at least one lipid moiety conjugated to the 5′ terminus, and wherein the sense strand comprises at least one locked nucleic acid, and
[0209] (ii) an antisense strand 22 nucleotides in length, wherein the antisense strand comprises a region of complementarity to an astrocyte target mRNA, and wherein the sense and antisense strand are separate strands which form an asymmetric duplex region having an overhang of about 2-8 nucleotides at the 3′ terminus of the antisense strand, wherein the duplex region is about 14-20 nucleotides.

[0210] In other aspects, the disclosure provides a double-stranded oligonucleotide comprising:
[0211] (i) a sense strand 14-20 nucleotides in length, wherein the sense strand comprises at least one lipid moiety conjugated to the 5′ terminus, and wherein the sense strand comprises at least one locked nucleic acid, and
[0212] (ii) an antisense strand 22 nucleotides in length, wherein the antisense strand comprises a region of complementarity to a neuron target mRNA, and
[0213] wherein the sense and antisense strand are separate strands which form an asymmetric duplex region having an overhang of about 2-8 nucleotides at the 3′ terminus of the antisense strand, wherein the duplex region is about 14-20 nucleotides.

[0214] In further aspects, the disclosure provides a double-stranded oligonucleotide comprising:
[0215] (i) a sense strand 14-20 nucleotides in length, wherein the sense strand comprises at least one lipid moiety conjugated to the 5′ terminus, and wherein the sense strand comprises at least one locked nucleic acid, and
[0216] (ii) an antisense strand 22 nucleotides in length, wherein the antisense strand comprises a region of complementarity to an oligodendrocyte target mRNA, and
[0217] wherein the sense and antisense strand are separate strands which form an asymmetric duplex region having an overhang of about 2-8 nucleotides at the 3′ terminus of the antisense strand, wherein the duplex region is about 14-20 nucleotides.

[0218] In any of the foregoing or related aspects, the sense strand is 14 nucleotides in length. In some aspects, the sense strand comprises a locked nucleic acid at one or more of position 2, position 9, position 10, position 12, or position 13 with positions numbered 5′ to 3′. In some aspects, the antisense strand comprises a phosphorothioate linkage between positions 1 and 2, between positions 2 and 3, between positions 3 and 4, between positions 13 and 14, between positions 14 and 15, between positions 20 and 21, and between positions 21 and 22.

[0219] In any of the foregoing or related aspects, the sense strand is 20 nucleotides in length. In some aspects, the sense strand comprises a locked nucleic acid at one or more of position 2, position 15, or position 16 with positions numbered 5′ to 3′. In some aspects, the antisense strand comprises a phosphorothioate linkage between positions 1 and 2, between positions 2 and 3, between positions 3 and 4, between positions 20 and 21, and between positions 21 and 22.

[0220] In other aspects, the disclosure provides a method of reducing expression of a target mRNA in an astrocyte, comprising administering a double-stranded oligonucleotide wherein the oligonucleotide comprises:
[0221] (i) a sense strand, wherein the sense strand is 14-20 nucleotides in length, wherein the sense strand comprises at least one lipid moiety conjugated to the 5′ terminus, and wherein the sense strand comprises at least one locked nucleic acid, and
[0222] (ii) an antisense strand, wherein the antisense strand is 22 nucleotides in length, and wherein the antisense strand comprises a region of complementarity to a target mRNA in the astrocyte, and
[0223] wherein the sense and antisense strand are separate strands which form an asymmetric duplex region having an overhang of about 2-8 nucleotides at the 3′ terminus of the antisense strand, wherein the duplex region is about 14-20 nucleotides, thereby reducing expression of the target mRNA in the astrocyte. In some aspects, the oligonucleotide comprises a blunt end comprising the 3′ end of the sense strand and the 5′ end of the antisense strand. In some aspects, the sense strand comprises no more than 3 locked nucleic acids. In some aspects, the sense strand is 20 nucleotides in length, and wherein reduction of the target mRNA in an astrocyte is increased compared to reduction in a neuron. In some aspects, reduction of the target mRNA is increased by at least 5%. In some aspects, reduction of the target mRNA is increased by at least 5%, by at least 10%, by at least 15%, by at least 20%, by at least 25%, by at least 30%, by at least 35%, by at least 40%, by at least 45% or by at least 50%. In some aspects, the sense strand is 14 nucleotides in length, and wherein reduction of the target mRNA in an astrocyte is increased compared to reduction in an oligodendrocyte. In some aspects, reduction of the target mRNA is increased by at least 5%. In some aspects, reduction of the target mRNA is increased by at least 5%, by at least 10%, by at least 15%, by at least 20%, by at least 25%, by at least 30%, by at least 35%, by at least 40%, by at least 45% or by at least 50%. In some aspects, the sense strand is 20 nucleotides in length, and wherein the target mRNA is reduced in an astrocyte and an oligodendrocyte to the same or similar level. In some aspects, the sense strand is 14 nucleotides in length, wherein the target mRNA is reduced in an astrocyte and in a neuron to the same or similar level, and wherein reduction of the target mRNA in an astrocyte and in a neuron is increased compared to reduction in an oligodendrocyte. In some aspects, reduction of the target mRNA is increased by at least 5%. In some aspects, reduction of the target mRNA is increased by at least 5%, by at least 10%, by at least 15%, by at least 20%, by at least 25%, by at least 30%, by at least 35%, by at least 40%, by at least 45% or by at least 50%.

[0224] In other aspects, the disclosure provides a method of reducing expression of a target mRNA in an oligodendrocyte, comprising administering a double-stranded oligonucleotide wherein the oligonucleotide comprises:
[0225] (i) a sense strand, wherein the sense strand is 14-40 nucleotides in length, wherein the sense strand comprises at least one lipid moiety conjugated to the 5′ terminus, and wherein the sense strand comprises at least one locked nucleic acid, and
[0226] (ii) an antisense strand, wherein the antisense strand is 22 nucleotides in length, and wherein the antisense strand comprises a region of complementarity to a target mRNA in the oligodendrocyte, and
[0227] wherein the sense and antisense strand are separate strands which form an asymmetric duplex region having an overhang of about 2-8 nucleotides at the 3′ terminus of the antisense strand, wherein the duplex region is about 14-20 nucleotides, thereby reducing expression of the target mRNA in the oligodendrocyte. In some aspects, the oligonucleotide comprises a blunt end comprising the 3′ end of the sense strand and the 5′ end of the antisense strand. In some aspects, the sense strand is 20 nucleotides in length. In some aspects, the sense strand in 36 nucleotides in length, and wherein the oligonucleotide comprises a stem-loop. In some aspects, the target mRNA is reduced in an astrocyte and the oligodendrocyte to the same or similar level, and wherein reduction of the target mRNA is increased in the astrocyte and the oligodendrocyte compared to reduction in a neuron. In some aspects, reduction of the target mRNA is increased by at least 5%. In some aspects, reduction of the target mRNA is increased by at least 5%, by at least 10%, by at least 15%, by at least 20%, by at least 25%, by at least 30%, by at least 35%, by at least 40%, by at least 45% or by at least 50%.

[0228] In other aspects, the disclosure provides a method of reducing expression of a target mRNA in a neuron, comprising administering a double-stranded oligonucleotide wherein the oligonucleotide comprises:
[0229] (i) a sense strand, wherein the sense strand is 14-20 nucleotides in length, wherein the sense strand comprises at least one lipid moiety conjugated to the 5′ terminus, and wherein the sense strand comprises at least one locked nucleic acid, and
[0230] (ii) an antisense strand, wherein the antisense strand is 22 nucleotides in length, and wherein the antisense strand comprises a region of complementarity to a target mRNA in the neuron, and
[0231] wherein the sense and antisense strand are separate strands which form an asymmetric duplex region having an overhang of about 2-8 nucleotides at the 3′ terminus of the antisense strand, wherein the duplex region is about 14-20 nucleotides, thereby reducing expression of the target mRNA in the neuron. In some aspects, the oligonucleotide comprises a blunt end comprising the 3′ end of the sense strand and the 5′ end of the antisense strand. In some aspects, the sense strand comprises no more than 5 locked nucleic acids. In some aspects, the sense strand is 14 nucleotides in length.

[0232] The mammalian CNS is a complex system of tissues, including cells, fluids and chemicals that interact in concert to enable a wide variety of functions, including movement, navigation, cognition, speech, vision, and emotion. Unfortunately, a variety of diseases and disorders of the CNS are known (e.g., neurological disorders) and affect or disrupt some or all of these functions. Typically, treatments for diseases and disorders of the CNS have been limited to small molecule drugs, antibodies and/or to adaptive or behavioral therapies. There exists an ongoing need to develop treatment of diseases and disorders of the CNS associated with inappropriate gene expression.

[0233] The present disclosure is based, at least in part, on the discovery of lipid-conjugated RNAi oligonucleotides that effectively reduce target gene expression in astrocytes of the CNS. Exemplary lipid-conjugated RNAi oligonucleotides provided herein have demonstrated reduction of target gene expression of astrocyte-specific mRNA in the CNS following a single administration. Further, exemplary lipid-conjugated RNAi oligonucleotides provided herein have demonstrated pharmacological activity in multiple regions throughout the CNS, including difficult to reach areas such as the hippocampus and frontal cortex. Without being bound by theory, the hydrophobic moiety (e.g., lipid) facilitates delivery and distribution of the lipid-conjugated RNAi oligonucleotides into the CNS, thereby increasing efficacy and durability of gene knockdown in astrocytes. Accordingly, the disclosure provides methods of treating a disease or disorder by modulating expression of an astrocyte gene in the CNS using the lipid-conjugated RNAi oligonucleotides, and pharmaceutically acceptable compositions thereof, described herein. The disclosure further provides methods of using the lipid-conjugated RNAi oligonucleotides in the manufacture of a medicament for treating a disease or disorder by modulating expression of an astrocyte gene in the CNS.

[0234] Accordingly, in some aspects the disclosure provides a double-stranded oligonucleotide comprising an antisense strand of 15-30 nucleotides in length and a sense strand of 15-50 nucleotides in length, wherein the antisense and sense strands form a duplex region of 15-30 base pairs, wherein the antisense strand comprises a region of complementarity to an astrocyte mRNA target sequence, and wherein the sense strand comprises at least one lipid moiety conjugated to a nucleotide of the sense strand.

[0235] In some aspects, the lipid moiety is selected from

[chemical structure]

[0236] In some aspects, the lipid moiety is a hydrocarbon chain. In some aspects, the hydrocarbon chain is a C8-C30 hydrocarbon chain. In some aspects, the hydrocarbon chain is a C16 hydrocarbon chain. In some aspects, the C16 hydrocarbon chain is represented by

[chemical structure]

[0237] In any of the foregoing or related aspects, the lipid moiety is conjugated to the 2′ carbon of the ribose ring of the nucleotide.

[0238] In any of the foregoing or related aspects, the oligonucleotide is blunt ended. In some aspects, the oligonucleotide is blunt ended at the 3′ terminus of the oligonucleotide. In some aspects, the oligonucleotide comprises a blunt end. In some aspects, the blunt end comprises the 3′ terminus of the sense strand. In some aspects, the sense strand is 20-22 nucleotides. In some aspects, the at least one lipid moiety is conjugated to a nucleotide at position 1, position 4, position 8, position 12, position 13, position 18, or position 20 of the sense strand, wherein positions are numbered 5′ to 3′. In some aspects, the astrocyte mRNA target is expressed in the spinal cord, wherein the at least one lipid moiety is conjugated to a nucleotide at position 1, position 4, position 8, position 12, position 13, position 18 or position 20 of the sense strand, and wherein positions are numbered 5′ to 3′. In other aspects, the astrocyte mRNA target is expressed in the medulla, wherein the at least one lipid moiety is conjugated to a nucleotide at position 1, position 4, position 8, position 12, position 13, position 18 or position 20 of the sense strand, and wherein positions are numbered 5′ to 3′. In further aspects, the astrocyte mRNA target is expressed in the cerebellum, wherein the at least one lipid moiety is conjugated to a nucleotide at position 4, position 12, position 13, position 18 or position 20 of the sense strand, and wherein positions are numbered 5′ to 3′. In some aspects, the astrocyte mRNA target is expressed in the hypothalamus, wherein the at least one lipid moiety is conjugated to a nucleotide at position 1, position 4, position 12, position 13, position 18 or position 20 of the sense strand, and wherein positions are numbered 5′ to 3′. In other aspects, the astrocyte mRNA target is expressed in the frontal cortex, wherein the at least one lipid moiety is conjugated to a nucleotide at position 4 of the sense strand, and wherein positions are numbered 5′ to 3′.

[0239] In any of the foregoing or related aspects, the sense strand comprises a stem-loop at the 3′ end, wherein the stem-loop comprises a nucleotide sequence represented by the formula: 5′-S1-L-S2-3′, wherein S1 is complementary to S2, and wherein L forms a loop between S1 and S2. In some aspects, the sense strand is 36-38 nucleotides. In some aspects, the astrocyte mRNA target is expressed in the spinal cord, wherein the at least one lipid moiety is conjugated to a nucleotide at position 1, position 4, position 8, position 12, position 13, position 18, position 20, position 23, position 28, position 29 or position 30 of the sense strand, and wherein positions are numbered 5′ to 3′. In other aspects, the astrocyte mRNA target is expressed in the medulla, wherein the at least one lipid moiety is conjugated to a nucleotide at position 1, position 4, position 18, position 20, position 23, position 28, position 29 or position 30 of the sense strand, and wherein positions are numbered 5′ to 3′. In further aspects, the astrocyte mRNA target is expressed in the cerebellum, wherein the at least one lipid moiety is conjugated to a nucleotide at position 1, position 4, position 23, position 28, or position 29 of the sense strand, and wherein positions are numbered 5′ to 3′. In some aspects, the astrocyte mRNA target is expressed in the hypothalamus, wherein the at least one lipid moiety is conjugated to a nucleotide at position 1, position 4, position 12, position 13, position 18, position 20, position 23, position 28, position 29 or position 30 of the sense strand, and wherein positions are numbered 5′ to 3′. In other aspects, the astrocyte mRNA target is expressed in the frontal cortex, wherein the at least one lipid moiety is conjugated to a nucleotide at position 23 of the sense strand, and wherein positions are numbered 5′ to 3′.

[0240] In any of the foregoing or related aspects, the antisense strand is 22-24 nucleotides. In some aspects, the duplex region is 20-22 base pairs.

[0241] In any of the foregoing or related aspects, the antisense strand comprises a 1-4 nucleotide overhang at the 3′ terminus. In some aspects, the overhang comprises purine nucleotides. In some aspects, the overhang sequence is 2 nucleotides in length. In some aspects, the overhang is selected from AA, GG, AG, and GA. In some aspects, the overhang is GG or AA. In some aspects, the overhang is GG.

[0242] In any of the foregoing or related aspects, the region of complementarity is complementary to at least 15 consecutive nucleotides of the astrocyte mRNA target sequence. In some aspects, the region of complementarity is complementary to 19 consecutive nucleotides of the astrocyte mRNA target sequence. In some aspects, the region of complementarity is fully complementary to the astrocyte mRNA target sequence. In some aspects, the region of complementarity is partially complementary to the astrocyte mRNA target sequence. In some aspects, the region of complementarity comprises no more than four mismatches to the astrocyte mRNA target sequence. In some aspects, the region of complementarity comprises up to four mismatches to the astrocyte mRNA target sequence.

[0243] In any of the foregoing or related aspects, the oligonucleotide comprises at least one modified nucleotide. In some aspects, the modified nucleotide comprises a 2′-modification. In some aspects, each of the nucleotides of the sense strand and the antisense strand comprise a 2′-modification except the nucleotide of the sense strand conjugated to the at least one lipid moiety. In some aspects, the 2′-modification is a modification selected from 2′-aminoethyl, 2′-fluoro, 2′-O-methyl, 2′-O-methoxyethyl, and 2′-deoxy-2′-fluoro-β-d-arabinonucleic acid. In some aspects, about 10-20%, 10%, 11%, 12%, 13%, 14% 15%, 16%, 17%, 18%, 19% or 20% of the nucleotides of the sense strand comprise a 2′-fluoro modification. In some aspects, about 25-35%, 25%, 26%, 27%, 28%, 29%, 30%, 31%, 32%, 33%, 34% or 35% of the nucleotides of the antisense strand comprise a 2′-fluoro modification. In some aspects, about 25-35%, 25%, 26%, 27%, 28%, 29%, 30%, 31%, 32%, 33%, 34% or 35% of the nucleotides of the oligonucleotide comprise a 2′-fluoro modification. In some aspects, the sense strand comprises 20 nucleotides with positions 1-20 from 5′ to 3′, wherein each of positions 8-11 comprise a 2′-fluoro modification. In some aspects, the sense strand comprises 20 nucleotides with positions 1-20 from 5′ to 3′, wherein each of positions 9-11 comprise a 2′-fluoro modification. In some aspects, the sense strand comprises 36 nucleotides with positions 1-36 from 5′ to 3′, wherein each of positions 8-11 comprise a 2′-fluoro modification. In some aspects, the sense strand comprises 36 nucleotides with positions 1-36 from 5′ to 3′, wherein each of positions 9-11 comprise a 2′-fluoro modification. In some aspects, the antisense strand comprises 22 nucleotides with positions 1-22 from 5′ to 3′, and wherein each of positions 2, 3, 4, 5, 7, 10 and 14 comprise a 2′-fluoro modification. In some aspects, the remaining nucleotides comprise a 2′-O-methyl modification except the nucleotide of the sense strand conjugated to the at least one lipid moiety.

[0244] In any of the foregoing or related aspects, the oligonucleotide comprises at least one modified internucleotide linkage. In some aspects, the at least one modified internucleotide linkage is a phosphorothioate linkage. In some aspects, the antisense strand comprises a phosphorothioate linkage (i) between positions 1 and 2, and between positions 2 and 3; or (ii) between positions 1 and 2, between positions 2 and 3, and between positions 3 and 4, wherein positions are numbered 1-4 from 5′ to 3′. In some aspects, the antisense strand is 22 nucleotides in length, and wherein the antisense strand comprises a phosphorothioate linkage between positions 20 and 21 and between positions 21 and 22, wherein positions are numbered 1-22 from 5′ to 3′. In some aspects, the sense strand comprises a phosphorothioate linkage between position 1 and 2, wherein positions are numbered 1-2 from 5′ to 3′. In some aspects, the sense strand is 20 nucleotides in length, and wherein the sense strand comprises a phosphorothioate linkage between positions 18 and 19, and between positions 19 and 20, wherein positions are numbered 1-22 from 5′ to 3′.

[0245] In any of the foregoing or related aspects, the antisense strand comprises a phosphorylated nucleotide at the 5′ terminus, wherein the phosphorylated nucleotide is selected from uridine and adenosine. In some aspects, the phosphorylated nucleotide is uridine. In some aspects, the 4′-carbon of the sugar of the 5′-nucleotide of the antisense strand comprises a phosphate analog. In some aspects, the phosphate analog is oxymethyl phosphonate, vinyl phosphonate or malonyl phosphonate.

[0246] In any of the foregoing or related aspects, the region of complementary is fully complementary to the astrocyte mRNA target sequence at nucleotide positions 2-8 of the antisense strand, wherein nucleotide positions are numbered 5′ to 3′. In some aspects, the region of complementary is fully complementary to the astrocyte mRNA target sequence at nucleotide positions 2-11 of the antisense strand, wherein nucleotide positions are numbered 5′ to 3′.

[0247] In any of the foregoing or related aspects, the oligonucleotide is a Dicer substrate. In some aspects, the oligonucleotide is a Dicer substrate that, upon endogenous Dicer processing, yields double-stranded nucleic acids of 19-21 nucleotides in length capable of reducing an astrocyte mRNA expression in a mammalian cell.

[0248] In any of the foregoing or related aspects, the astrocyte mRNA target sequence is located in a region of the central nervous system (CNS). In some aspects, the region of the CNS is selected from the spinal cord, lumbar spinal cord, thoracic spinal cord, cervical spinal cord, medulla, hippocampus, cerebellum, hypothalamus, frontal cortex, and a combination thereof.

[0249] In any of the foregoing or related aspects, the oligonucleotide reduces expression of a target mRNA in an astrocyte or population of astrocytes in vitro and/or in vivo.

[0250] In some aspects, the disclosure provides a pharmaceutical composition comprising an oligonucleotide described herein, and a pharmaceutically acceptable carrier, delivery agent or excipient.

[0251] In other aspects, the disclosure provides a method for treating a subject having a disease, disorder or condition associated with expression of an astrocyte mRNA, the method comprising administering to the subject a therapeutically effective amount of an oligonucleotide or pharmaceutical composition described herein, thereby treating the subject.

[0252] In further aspects, the disclosure provides a method of delivering an oligonucleotide to an astrocyte or a population of astrocytes in a subject, the method comprising administering a pharmaceutical composition described herein to the subject. In some aspects, the astrocyte or a population of astrocytes is located in a region of the CNS. In some aspects, the region of the CNS is selected from the spinal cord, lumbar spinal cord, thoracic spinal cord, cervical spinal cord, medulla, hippocampus, cerebellum, hypothalamus, frontal cortex, and a combination thereof.

[0253] In other aspects, the disclosure provides a method for reducing expression of an astrocyte mRNA in a cell, a population of cells or a subject, the method comprising the step of:
[0254] i. contacting the cell or the population of cells with an oligonucleotide or pharmaceutical composition described herein, optionally wherein the cell or population of cells is an astrocyte or a population of astrocytes; or
[0255] ii. administering to the subject an oligonucleotide or pharmaceutical composition described herein. In some aspects, reducing expression of the astrocyte mRNA comprises reducing an amount or level of mRNA, an amount or level of protein, or both. In some aspects, the subject has a disease, disorder or condition associated with expression of the astrocyte mRNA. In some aspects, the cell or population of cells is located in a region of the CNS. In some aspects, the region of the CNS is selected from the spinal cord, lumbar spinal cord, thoracic spinal cord, cervical spinal cord, medulla, hippocampus, cerebellum, hypothalamus, frontal cortex, and a combination thereof.

[0256] In any of the foregoing or related aspects, the methods comprise administering via intrathecal administration.

[0257] In some aspects, the disclosure provides a method of reducing expression of a target mRNA expressed in an astrocyte in a tissue of the CNS of a subject, comprising administering to the subject a double-stranded oligonucleotide comprising an antisense strand of 15-30 nucleotides in length and a sense strand of 15-50 nucleotides in length, wherein the antisense and sense strands form a duplex region of 15-30 base pairs, wherein the antisense strand comprises a region of complementarity to a target sequence in the target mRNA, and wherein the sense strand comprises at least one lipid moiety conjugated to a nucleotide of the sense strand. In some aspects, the lipid moiety is a C16 hydrocarbon.

[0258] In any of the foregoing or related aspects of the methods described herein, the oligonucleotide is blunt ended at the 3′ terminus of the oligonucleotide. In some aspects, the oligonucleotide comprises a blunt end. In some aspects, the blunt end comprises the 3′ terminus of the sense strand. In some aspects, the sense strand is 22-24 nucleotides. In some aspects, the tissue is the spinal cord, wherein the at least one lipid moiety is conjugated to a nucleotide at position 1, position 4, position 8, position 12, position 13, position 18 or position 20 of the sense strand, and wherein positions are numbered 5′ to 3′. In other aspects, the tissue is the medulla, wherein the at least one lipid moiety is conjugated to a nucleotide at position 1, position 4, position 8, position 12, position 13, position 18 or position 20 of the sense strand, and wherein positions are numbered 5′ to 3′. In further aspects, the tissue is the cerebellum, wherein the at least one lipid moiety is conjugated to a nucleotide at position 4, position 12, position 13, position 18 or position 20 of the sense strand, and wherein positions are numbered 5′ to 3′. In some aspects, the tissue is the hypothalamus, wherein the at least one lipid moiety is conjugated to a nucleotide at position 1, position 4, position 12, position 13, position 18 or position 20 of the sense strand, and wherein positions are numbered 5′ to 3. In other aspects, the tissue is the frontal cortex, wherein the at least one lipid moiety is conjugated to a nucleotide at position 4 of the sense strand, and wherein positions are numbered 5′ to 3′.

[0259] In any of the foregoing or related aspects of the methods described herein, the sense strand comprises a stem-loop at the 3′ end, wherein the stem-loop comprises a nucleotide sequence represented by the formula: 5′-S1-L-S2-3′, wherein S1 is complementary to S2, and wherein L forms a loop between S1 and S2. In some aspects, the sense strand is 36-38 nucleotides. In some aspects, the tissue is the spinal cord, wherein the at least one lipid moiety is conjugated to a nucleotide at position 1, position 4, position 8, position 12, position 13, position 18, position 20, position 23, position 28, position 29 or position 30 of the sense strand, and wherein positions are numbered 5′ to 3′. In other aspects, the tissue is the medulla, wherein the at least one lipid moiety is conjugated to a nucleotide at position 1, position 4, position 18, position 20, position 23, position 28, position 29 or position 30 of the sense strand, and wherein positions are numbered 5′ to 3′. In further aspects, the tissue is the cerebellum, wherein the at least one lipid moiety is conjugated to a nucleotide at position 1, position 4, position 23, position 28, or position 29 of the sense strand, and wherein positions are numbered 5′ to 3′. In some aspects, the tissue is the hypothalamus, wherein the at least one lipid moiety is conjugated to a nucleotide at position 1, position 4, position 12, position 13, position 18, position 20, position 23, position 28, position 29 or position 30 of the sense strand, and wherein positions are numbered 5′ to 3′. In other aspects, the tissue is the frontal cortex, wherein the at least one lipid moiety is conjugated to a nucleotide at position 23 of the sense strand, and wherein positions are numbered 5′ to 3′.

[0260] In any of the foregoing or related aspects of the methods described herein, a single dose of the oligonucleotide or pharmaceutical composition reduces expression of the astrocyte mRNA for at least 4 weeks, at least 8 weeks, at least 12 weeks, at least 23 weeks, at least 26 weeks, or at least 29 weeks. In some aspects, a single dose of the oligonucleotide or pharmaceutical composition reduces expression of the astrocyte mRNA for at least 4 weeks. In some aspects, a single dose of the oligonucleotide or pharmaceutical composition reduces expression of the astrocyte mRNA for at least 8 weeks. In some aspects, a single dose of the oligonucleotide or pharmaceutical composition reduces expression of the astrocyte mRNA for at least 12 weeks. In some aspects, a single dose of the oligonucleotide or pharmaceutical composition reduces expression of the astrocyte mRNA for at least 23 weeks. In some aspects, a single dose of the oligonucleotide or pharmaceutical composition reduces expression of the astrocyte mRNA for at least 26 weeks. In some aspects, a single dose of the oligonucleotide or pharmaceutical composition reduces expression of the astrocyte mRNA for at least 29 weeks.

[0261] In any of the foregoing or related aspects of the methods described herein, a single dose of the oligonucleotide or pharmaceutical composition reduces expression of the astrocyte mRNA for up to 4 weeks, up to 8 weeks, up to 12 weeks, up to 23 weeks, up to 26 weeks, or up to 29 weeks. In some aspects, a single dose of the oligonucleotide or pharmaceutical composition reduces expression of the astrocyte mRNA for up to 4 weeks. In some aspects, a single dose of the oligonucleotide or pharmaceutical composition reduces expression of the astrocyte mRNA for up to 8 weeks. In some aspects, a single dose of the oligonucleotide or pharmaceutical composition reduces expression of the astrocyte mRNA for up to 12 weeks. In some aspects, a single dose of the oligonucleotide or pharmaceutical composition reduces expression of the astrocyte mRNA for up to 23 weeks. In some aspects, a single dose of the oligonucleotide or pharmaceutical composition reduces expression of the astrocyte mRNA for up to 26 weeks. In some aspects, a single dose of the oligonucleotide or pharmaceutical composition reduces expression of the astrocyte mRNA for up to 29 weeks.

[0262] In any of the foregoing or related aspects of the methods described herein, a single dose of the oligonucleotide or pharmaceutical composition reduces expression of the astrocyte mRNA for up to one year.

[0263] In some aspects, the disclosure provides a kit comprising an oligonucleotide described herein, an optional pharmaceutically acceptable carrier, and a package insert comprising instructions for administration to a subject having a disease, disorder or condition associated with expression of an astrocyte mRNA. In some aspects, the package insert comprises instructions for intrathecal administration.

[0264] In other aspects, the disclosure provides use of an oligonucleotide or pharmaceutical composition described herein, in the manufacture of a medicament for the treatment of a disease, disorder or condition associated with expression of an astrocyte mRNA.

[0265] In further aspects, the disclosure provides an oligonucleotide or pharmaceutical composition described herein for use, or adaptable for use, in the treatment of a disease, disorder or condition associated with expression of an astrocyte mRNA.

[0266] The present disclosure is based, at least in part, on the discovery of lipid-conjugated RNAi oligonucleotides that effectively reduce target gene expression in oligodendrocytes of the CNS. Exemplary lipid-conjugated RNAi oligonucleotides provided herein have demonstrated reduction of target gene expression of oligodendrocyte-specific mRNA in the CNS following a single administration. Further, exemplary lipid-conjugated RNAi oligonucleotides provided herein have demonstrated pharmacological activity in multiple regions throughout the CNS, including difficult to reach areas such as the hippocampus and frontal cortex. Without being bound by theory, the hydrophobic moiety (e.g., lipid) facilitates delivery and distribution of the lipid-conjugated RNAi oligonucleotides into the CNS, thereby increasing efficacy and durability of gene knockdown in oligodendrocytes. Accordingly, the disclosure provides methods of treating a disease or disorder by modulating expression of an oligodendrocyte gene in the CNS using the lipid-conjugated RNAi oligonucleotides, and pharmaceutically acceptable compositions thereof, described herein. The disclosure further provides methods of using the lipid-conjugated RNAi oligonucleotides in the manufacture of a medicament for treating a disease or disorder by modulating expression of an oligodendrocyte gene in the CNS.

[0267] Accordingly, in some aspects, the disclosure provides a double-stranded oligonucleotide comprising an antisense strand of 15-30 nucleotides in length and a sense strand of 15-50 nucleotides in length, wherein the antisense and sense strands form a duplex region of 15-30 base pairs, wherein the antisense strand comprises a region of complementarity to an oligodendrocyte mRNA target sequence, and wherein the sense strand comprises at least one lipid moiety conjugated to a nucleotide of the sense strand.

[0268] In some aspects, the lipid moiety is selected from

[chemical structure]

[chemical structure]

[0269] In some aspects, the lipid moiety is a hydrocarbon chain. In some aspects, the hydrocarbon chain is a C8-C30 hydrocarbon chain. In some aspects, the hydrocarbon chain is a C16 hydrocarbon chain. In some aspects, the C16 hydrocarbon chain is represented by

[chemical structure]

[0270] In any of the foregoing or related aspects, the lipid moiety is conjugated to the 2′ carbon of the ribose ring of the nucleotide.

[0271] In any of the foregoing or related aspects, the oligonucleotide is blunt ended. In some aspects, the oligonucleotide is blunt ended at the 3′ terminus of the oligonucleotide. In some aspects, the oligonucleotide comprises a blunt end. In some aspects, the blunt end comprises the 3′ terminus of the sense strand. In some aspects, the sense strand is 20-22 nucleotides. In some aspects, the at least one lipid moiety is conjugated to a nucleotide at position 1, position 4, position 8, position 12, position 13, position 18, or position 20 of the sense strand, wherein positions are numbered 5′ to 3′. In some aspects, the oligodendrocyte mRNA target is expressed in the spinal cord, wherein the at least one lipid moiety is conjugated to a nucleotide at position 2, position 3, position 6, position 13, position 14, position 15, position 19 or position 20 of the sense strand, and wherein positions are numbered 5′ to 3′. In some aspects, the oligodendrocyte mRNA target is expressed in the spinal cord, wherein the at least one lipid moiety is conjugated to a nucleotide at position 1, position 2, position 3, position 5, position 6, position 7, position 9, position 13, position 14, position 15, position 17, position 19, or position 20 of the sense strand, and wherein positions are numbered 5′ to 3′. In other aspects, the oligodendrocyte mRNA target is expressed in the medulla, wherein the at least one lipid moiety is conjugated to a nucleotide at position 2, position 14 or position 15 of the sense strand, and wherein positions are numbered 5′ to 3′. In other aspects, the oligodendrocyte mRNA target is expressed in the medulla, wherein the at least one lipid moiety is conjugated to a nucleotide at position 2, position 7, position 9, position 14, position 15, or position 19 of the sense strand, and wherein positions are numbered 5′ to 3′. In other aspects, the oligodendrocyte mRNA target is expressed in the brain stem, wherein the at least one lipid moiety is conjugated to a nucleotide at position 2, position 7, position 9, position 14, position 15, or position 19 of the sense strand, and wherein positions are numbered 5′ to 3′. In further aspects, the oligodendrocyte mRNA target is expressed in the hippocampus, wherein the at least one lipid moiety is conjugated to a nucleotide at position 3 of the sense strand, and wherein positions are numbered 5′ to 3′. In some aspects, the oligodendrocyte mRNA target is expressed in the frontal cortex, wherein the at least one lipid moiety is conjugated to a nucleotide at position 14 of the sense strand, and wherein positions are numbered 5′ to 3′. In some aspects, the oligodendrocyte mRNA target is expressed in the hypothalamus, wherein the at least one lipid moiety is conjugated to a nucleotide at position 7 of the sense strand, and wherein positions are numbered 5′ to 3′.

[0272] In any of the foregoing or related aspects, the sense strand comprises a stem-loop at the 3′ end, wherein the stem-loop comprises a nucleotide sequence represented by the formula: 5′-S1-L-S2-3′, wherein S1 is complementary to S2, and wherein L forms a loop between S1 and S2. In some aspects, the sense strand is 36-38 nucleotides. In some aspects, the at least one lipid moiety is conjugated to a nucleotide of the stem-loop or a nucleotide proximal to the stem-loop. In some aspects, the nucleotide proximal to the stem-loop is located 1-3 nucleotides from the 5′ end of the stem-loop. In some aspects, the oligodendrocyte mRNA target is expressed in the spinal cord, wherein the at least one lipid moiety is conjugated to a nucleotide at position 2, position 3, position 6, position 13, position 14, position 15, position 19, position 20, position 23, position 28, position 29 or position 30 of the sense strand, and wherein positions are numbered 5′ to 3′. In other aspects, the oligodendrocyte mRNA target is expressed in the medulla, wherein the at least one lipid moiety is conjugated to a nucleotide at position 19, position 20, position 23 or position 28 of the sense strand, and wherein positions are numbered 5′ to 3′. In further aspects, the oligodendrocyte mRNA target is expressed in the hippocampus, wherein the at least one lipid moiety is conjugated to a nucleotide at position 2 of the sense strand, and wherein positions are numbered 5′ to 3′. In some aspects, the oligodendrocyte mRNA target is expressed in the frontal cortex, wherein the at least one lipid moiety is conjugated to a nucleotide at position 14, position 15, position 19, position 20, position 23, position 28, position 29 or position 30 of the sense strand, and wherein positions are numbered 5′ to 3′.

[0273] In any of the foregoing or related aspects, the antisense strand is 22-24 nucleotides. In some aspects, the duplex region is 20-22 base pairs.

[0274] In any of the foregoing or related aspects, the antisense strand comprises a 1-4 nucleotide overhang at the 3′ terminus. In some aspects, the overhang comprises purine nucleotides. In some aspects, the overhang sequence is 2 nucleotides in length. In some aspects, the overhang is selected from AA, GG, AG, and GA. In some aspects, the overhang is GG or AA. In some aspects, the overhang is GG.

[0275] In any of the foregoing or related aspects, the region of complementarity is complementary to at least 15 consecutive nucleotides of the oligodendrocyte mRNA target sequence. In some aspects, the region of complementarity is complementary to 19 consecutive nucleotides of the oligodendrocyte mRNA target sequence. In some aspects, the region of complementarity is fully complementary to the oligodendrocyte mRNA target sequence. In some aspects, the region of complementarity is partially complementary to the oligodendrocyte mRNA target sequence. In some aspects, the region of complementarity comprises no more than four mismatches to the oligodendrocyte mRNA target sequence. In some aspects, the region of complementarity comprises up to four mismatches to the oligodendrocyte mRNA target sequence.

[0276] In any of the foregoing or related aspects, the oligonucleotide comprises at least one modified nucleotide. In some aspects, the modified nucleotide comprises a 2′-modification. In some aspects, each of the nucleotides of the sense strand and the antisense strand comprise a 2′-modification except the nucleotide of the sense strand conjugated to the at least one lipid moiety. In some aspects, the 2′-modification is a modification selected from 2′-aminoethyl, 2′-fluoro, 2′-O-methyl, 2′-O-methoxyethyl, and 2′-deoxy-2′-fluoro-β-d-arabinonucleic acid. In some aspects, about 10-20%, 10%, 11%, 12%, 13%, 14% 15%, 16%, 17%, 18%, 19% or 20% of the nucleotides of the sense strand comprise a 2′-fluoro modification. In some aspects, about 25-35%, 25%, 26%, 27%, 28%, 29%, 30%, 31%, 32%, 33%, 34% or 35% of the nucleotides of the antisense strand comprise a 2′-fluoro modification. In some aspects, about 25-35%, 25%, 26%, 27%, 28%, 29%, 30%, 31%, 32%, 33%, 34% or 35% of the nucleotides of the oligonucleotide comprise a 2′-fluoro modification. In some aspects, the sense strand comprises 20 nucleotides with positions 1-20 from 5′ to 3′, wherein each of positions 8-11 comprise a 2′-fluoro modification. In some aspects, the sense strand comprises 20 nucleotides with positions 1-20 from 5′ to 3′, wherein each of positions 9-11 comprise a 2′-fluoro modification. In some aspects, the sense strand comprises 36 nucleotides with positions 1-36 from 5′ to 3′, wherein each of positions 8-11 comprise a 2′-fluoro modification. In some aspects, the sense strand comprises 36 nucleotides with positions 1-36 from 5′ to 3′, wherein each of positions 9-11 comprise a 2′-fluoro modification. In some aspects, the antisense strand comprises 22 nucleotides with positions 1-22 from 5′ to 3′, and wherein each of positions 2, 3, 4, 5, 7, 10 and 14 comprise a 2′-fluoro modification. In some aspects, the remaining nucleotides comprise a 2′-O-methyl modification except the nucleotide of the sense strand conjugated to the at least one lipid moiety.

[0277] In any of the foregoing or related aspects, the oligonucleotide comprises at least one modified internucleotide linkage. In some aspects, the at least one modified internucleotide linkage is a phosphorothioate linkage. In some aspects, the antisense strand comprises a phosphorothioate linkage (i) between positions 1 and 2, and between positions 2 and 3; or (ii) between positions 1 and 2, between positions 2 and 3, and between positions 3 and 4, wherein positions are numbered 1-4 from 5′ to 3′. In some aspects, the antisense strand is 22 nucleotides in length, and wherein the antisense strand comprises a phosphorothioate linkage between positions 20 and 21 and between positions 21 and 22, wherein positions are numbered 1-22 from 5′ to 3′. In some aspects, the sense strand comprises a phosphorothioate linkage between position 1 and 2, wherein positions are numbered 1-2 from 5′ to 3′. In some aspects, the sense strand is 20 nucleotides in length, and wherein the sense strand comprises a phosphorothioate linkage between positions 18 and 19, and between positions 19 and 20, wherein positions are numbered 1-22 from 5′ to 3′.

[0278] In any of the foregoing or related aspects, the antisense strand comprises a phosphorylated nucleotide at the 5′ terminus, wherein the phosphorylated nucleotide is selected from uridine and adenosine. In some aspects, the phosphorylated nucleotide is uridine. In some aspects, the 4′-carbon of the sugar of the 5′-nucleotide of the antisense strand comprises a phosphate analog. In some aspects, the phosphate analog is oxymethyl phosphonate, vinyl phosphonate or malonyl phosphonate.

[0279] In any of the foregoing or related aspects, the region of complementary is fully complementary to the oligodendrocyte mRNA target sequence at nucleotide positions 2-8 of the antisense strand, wherein nucleotide positions are numbered 5′ to 3′. In some aspects, the region of complementary is fully complementary to the oligodendrocyte mRNA target sequence at nucleotide positions 2-11 of the antisense strand, wherein nucleotide positions are numbered 5′ to 3′.

[0280] In any of the foregoing or related aspects, the oligonucleotide is a Dicer substrate. In some aspects, the oligonucleotide is a Dicer substrate that, upon endogenous Dicer processing, yields double-stranded nucleic acids of 19-21 nucleotides in length capable of reducing a oligodendrocyte mRNA expression in a mammalian cell.

[0281] In any of the foregoing or related aspects, the oligodendrocyte mRNA target sequence is located in a region of the central nervous system (CNS). In some aspects, the region of the CNS is selected from the frontal cortex, spinal cord, lumbar spinal cord, cervical spinal cord, thoracic spinal cord, medulla, cerebellum, hypothalamus, hippocampus, and a combination thereof.

[0282] In any of the foregoing or related aspects, the oligonucleotide reduces expression of a target mRNA in an oligodendrocyte or population of oligodendrocytes in vitro and/or in vivo. In some aspects, the disclosure provides a pharmaceutical composition comprising an oligonucleotide described herein, and a pharmaceutically acceptable carrier, delivery agent or excipient.

[0283] In other aspects, the disclosure provides a method for treating a subject having a disease, disorder or condition associated with expression of an oligodendrocyte mRNA, the method comprising administering to the subject a therapeutically effective amount of an oligonucleotide or pharmaceutical composition described herein, thereby treating the subject.

[0284] In further aspects, the disclosure provides a method of delivering an oligonucleotide to an oligodendrocyte or a population of oligodendrocytes in a subject, the method comprising administering a pharmaceutical composition described herein to the subject. In some aspects, the oligodendrocyte or a population of oligodendrocytes is located in a region of the CNS. In some aspects, the region of the CNS is selected from the frontal cortex, spinal cord, lumbar spinal cord, cervical spinal cord, thoracic spinal cord, medulla, cerebellum, hypothalamus, hippocampus, and a combination thereof.

[0285] In yet further aspects, the disclosure provides a method for reducing expression of an oligodendrocyte mRNA in a cell, a population of cells or a subject, the method comprising the step of:
[0286] i. contacting the cell or the population of cells with an oligonucleotide or pharmaceutical composition described herein, optionally wherein the cell or population of cells is an oligodendrocyte or a population of oligodendrocytes; or
[0287] ii. administering to the subject an oligonucleotide or pharmaceutical composition described herein. In some aspects, reducing expression of the oligodendrocyte mRNA comprises reducing an amount or level of mRNA, an amount or level of protein, or both. In some aspects, the subject has a disease, disorder or condition associated with expression of the oligodendrocyte mRNA. In some aspects, the cell or population of cells is located in a region of the CNS. In some aspects, the region of the CNS is selected from the frontal cortex, spinal cord, lumbar spinal cord, cervical spinal cord, thoracic spinal cord, medulla, cerebellum, hypothalamus, hippocampus, and a combination thereof.

[0288] In any of the foregoing or related aspects, the methods comprise administering via intrathecal administration.

[0289] In some aspects, the disclosure provides a method of reducing expression of a target mRNA expressed in an oligodendrocyte in a tissue of the CNS of a subject, comprising administering to the subject a double-stranded oligonucleotide comprising an antisense strand of 15-30 nucleotides in length and a sense strand of 15-50 nucleotides in length, wherein the antisense and sense strands form a duplex region of 15-30 base pairs, wherein the antisense strand comprises a region of complementarity to a target sequence in the target mRNA, and wherein the sense strand comprises at least one lipid moiety conjugated to a nucleotide of the sense strand. In some aspects, the lipid moiety is a C16 hydrocarbon.

[0290] In any of the foregoing or related aspects of the methods described herein, the oligonucleotide is blunt ended at the 3′ terminus of the oligonucleotide. In some aspects, the oligonucleotide comprises a blunt end. In some aspects, the blunt end comprises the 3′ terminus of the sense strand. In some aspects, the sense strand is 22-24 nucleotides. In some aspects, the tissue is the spinal cord, wherein the at least one lipid moiety is conjugated to a nucleotide at position 2, position 3, position 6, position 13, position 14, position 15, position 19 or position 20 of the sense strand, and wherein positions are numbered 5′ to 3′. In other aspects, the tissue is the spinal cord, wherein the at least one lipid moiety is conjugated to a nucleotide at position 1, position 2, position 3, position 5, position 6, position 7, position 9, position 13, position 14, position 15, position 17, position 19, or position 20 of the sense strand, and wherein positions are numbered 5′ to 3′. In other aspects, the tissue is the medulla, wherein the at least one lipid moiety is conjugated to a nucleotide at position 2, position 14 or position 15 of the sense strand, and wherein positions are numbered 5′ to 3′. In other aspects, the tissue is the medulla, wherein the at least one lipid moiety is conjugated to a nucleotide at position 2, position 7, position 14, position 15, or position 19 of the sense strand, and wherein positions are numbered 5′ to 3′. In other aspects, the tissue is the brain stem, wherein the at least one lipid moiety is conjugated to a nucleotide at position 2, position 7, position 14, position 15, or position 19 of the sense strand, and wherein positions are numbered 5′ to 3′. In further aspects, the tissue is the hippocampus, wherein the at least one lipid moiety is conjugated to a nucleotide at position 3 of the sense strand, and wherein positions are numbered 5′ to 3′. In some aspects, the tissue is the frontal cortex, wherein the at least one lipid moiety is conjugated to a nucleotide at position 14 of the sense strand, and wherein positions are numbered 5′ to 3′. In some aspects, the tissue is the hypothalamus, wherein the at least one lipid moiety is conjugated to a nucleotide at position 7 of the sense strand, and wherein positions are numbered 5′ to 3′.

[0291] In any of the foregoing or related aspects of the methods described herein, the sense strand comprises a stem-loop at the 3′ end, wherein the stem-loop comprises a nucleotide sequence represented by the formula: 5′-S1-L-S2-3′, wherein S1 is complementary to S2, and wherein L forms a loop between S1 and S2. In some aspects, the sense strand is 36-38 nucleotides. In some aspects, the at least one lipid moiety is conjugated to a nucleotide of the stem-loop or a nucleotide proximal to the stem-loop. In some aspects, the nucleotide proximal to the stem-loop is located 1-3 nucleotides from the 5′ end of the stem-loop. In some aspects, the tissue is the spinal cord, wherein the at least one lipid moiety is conjugated to a nucleotide at position 2, position 3, position 6, position 13, position 14, position 15, position 19, position 20, position 23, position 28, position 29 or position 30 of the sense strand, and wherein positions are numbered 5′ to 3′. In other aspects, the tissue is the medulla, wherein the at least one lipid moiety is conjugated to a nucleotide at position 19, position 20, position 23 or position 28 of the sense strand, and wherein positions are numbered 5′ to 3′. In further aspects, the tissue is the hippocampus, wherein the at least one lipid moiety is conjugated to a nucleotide at position 2 of the sense strand, and wherein positions are numbered 5′ to 3′. In some aspects, the tissue is the frontal cortex, wherein the at least one lipid moiety is conjugated to a nucleotide at position 14, position 15, position 19, position 20, position 23, position 28, position 29 or position 30 of the sense strand, and wherein positions are numbered 5′ to 3′.

[0292] In other aspects, the disclosure provides a kit comprising an oligonucleotide described herein, an optional pharmaceutically acceptable carrier, and a package insert comprising instructions for administration to a subject having a disease, disorder or condition associated with expression of an oligodendrocyte mRNA. In some aspects, the package insert comprises instructions for intrathecal administration.

[0293] In further aspects, the disclosure provides use of an oligonucleotide or pharmaceutical composition described herein, in the manufacture of a medicament for the treatment of a disease, disorder or condition associated with expression of an oligodendrocyte mRNA.

[0294] In some aspects, the disclosure provides an oligonucleotide or pharmaceutical composition described herein for use, or adaptable for use, in the treatment of a disease, disorder or condition associated with expression of an oligodendrocyte mRNA.

### BRIEF DESCRIPTION OF FIGURES

[0295] FIGS. 1A-1C provide schematics of RNAi oligonucleotide-lipid conjugates targeting TUBB3 mRNA having the structures of Compounds 1-14.

[0296] FIGS. 2A-2F provide graphs measuring percent (%) of murine TUBB3 mRNA remaining in frontal cortex (FIG. 2A), hippocampus (FIG. 2B), cerebellum (FIG. 2C), brain stem (FIG. 2D), lumbar dorsal root ganglion (DRG) (FIG. 2E), and lumbar spinal cord (FIG. 2F) of control mice (group A) or mice administered Compounds 1-14 (respectively groups B-O) via lumbar intrathecal injection.

[0297] FIG. 3 provides a schematic of RNAi oligonucleotide-lipid conjugates targeting TUBB3 mRNA having the structures of Compounds 15-18.

[0298] FIGS. 4A-4F provide graphs measuring percent (%) of murine TUBB3 mRNA remaining in frontal cortex (FIG. 4A), hippocampus (FIG. 4B), medulla (FIG. 4C) cerebellum (FIG. 4D), lumbar dorsal root ganglion (DRG) (FIG. 4E), and lumbar spinal cord (FIG. 4F) of control mice (group A) or mice administered Compounds 7-9 (respectively groups B-D) or Compounds 15-18 (respectively groups E-H) via lumbar intrathecal injection.

[0299] FIG. 5 provides a schematic of RNAi oligonucleotide-lipid conjugates targeting TUBB3 mRNA having the structures of Compounds 18-28.

[0300] FIGS. 6A-6B provide graphs measuring percent (%) of murine TUBB3 mRNA remaining in cerebellum (FIG. 6A) and lumbar dorsal root ganglion (DRG) (FIG. 6B) of control mice (group A) or mice administered Compounds 18-28 (respectively groups B-L).

[0301] FIG. 7 provides a schematic of RNAi oligonucleotide-lipid conjugates targeting TUBB3 mRNA having the structures of Compounds 18 and 29-38.

[0302] FIGS. 8A-8B provide graphs measuring percent (%) of murine TUBB3 mRNA remaining in cerebellum (FIG. 8A) and lumbar dorsal root ganglion (DRG) (FIG. 8B) of control mice (group A) or mice administered Compounds 18 or 29-38 (respectively groups B-L).

[0303] FIG. 9 provides a schematic of RNAi oligonucleotide-lipid conjugates targeting reticulon 4 (RTN4) mRNA having the structures of Compounds 39-49.

[0304] FIGS. 10A-10B provide graphs measuring percent (%) of rat RTN4 mRNA remaining in retina (FIG. 10A) and optic nerve (FIG. 8B) tissues of control rats (group A) or rats administered Compounds 39-49 (respectively groups B-L) via intravitreal injection.

[0305] FIG. 10C provides a schematic of RNAi oligonucleotide-GalNAc conjugates targeting Aldh2 mRNA having the structures of Compounds 57 and 98-108.

[0306] FIG. 10D provides a graph measuring percent (%) of murine Aldh2 mRNA remaining in liver tissue of control mice administered PBS (group A) or mice administered Compounds 57 or 98-108 (respectively groups B-N).

[0307] FIG. 10E provides a schematic of RNAi oligonucleotide-lipid conjugates targeting PECAM-1 mRNA having the structures of Compounds 120 and 121 and CD68 mRNA having the structure of Compound 122.

[0308] FIGS. 10F-10G provide graphs measuring percent (%) of murine PECAM mRNA (FIG. 10F) and CD68 mRNA (FIG. 10G) remaining in liver tissue of control mice administered PBS (group A) or mice administered Compounds 120-122 (respectively groups B-D) via subcutaneous injection.

[0309] FIGS. 10H-10I provide graphs measuring percent (%) of murine CD68 mRNA (FIG. 10H) and CD68 protein (FIG. 10I) remaining in liver tissue of control mice administered PBS or mice administered Compound 122 at the indicated dose via subcutaneous injection, as measured by qPCR and immunohistochemistry (IHC) respectively.

[0310] FIG. 10J provides a representative image of liver tissue obtained from a PBS control mice as described in FIGS. 10H-10I that were imaged following CD68 immunostaining. Arrows indicate representative cells that morphologically present as hepatocytes or macrophages. Dark staining indicates CD68 protein expression.

[0311] FIG. 10K provides representative images of liver tissue obtained from mice described in FIGS. 10H-10I that were imaged following CD68 immunostaining. Dark staining indicates CD68 protein expression.

[0312] FIGS. 11A-11B provide schematics of RNAi oligonucleotide-lipid conjugates targeting CD68 mRNA having the structures of Compounds 58-97.

[0313] FIG. 12 provides a graph measuring percent (%) of murine CD68 mRNA remaining in liver tissue of control mice administered PBS or mice administered Compounds 58-97 (respectively groups B-AO) via subcutaneous injection.

[0314] FIG. 13 provides a schematic of RNAi oligonucleotide-lipid conjugates targeting Aldh2 mRNA having the structures of Compounds 109-117.

[0315] FIGS. 14A-14D provide graphs measuring percent of murine Aldh2 mRNA remaining in liver (FIG. 14A), adipose (FIG. 14B), skeletal muscle (FIG. 14C), and adrenal (FIG. 14D) tissues in control mice administered PBS (group A) or mice administered Compounds 109-117 (respectively groups B-J) via subcutaneous injection.

[0316] FIG. 15 provides a schematic of RNAi oligonucleotide-lipid conjugates targeting STAT3 (Compounds 123 and 127), SLC25A1 (Compounds 124 and 128), HMGB1 (Compounds 125 and 129), and ALDH2 (Compounds 126 and 130).

[0317] FIGS. 16A-16D provide graphs measuring percent (%) of murine STAT3 mRNA remaining in liver tissue of mice administered PBS (group A) or compounds 123 or 127 (groups B1 and C1 respectively) (FIG. 16A); percent (%) of murine SLC25A1 mRNA remaining in liver tissue of mice administered PBS (group A) or compounds 124 or 128 (groups B2 and C2 respectively) (FIG. 16B); percent (%) of murine HMGB1 mRNA remaining in liver tissue of mice administered PBS (group A) or compounds 125 or 129 (groups B3 and C3 respectively) (FIG. 16C); and percent (%) of murine ALDH2 mRNA remaining in liver tissue of mice administered PBS (group A) or compounds 126 or 130 (groups B4 and C4 respectively) (FIG. 16D). Mice were administered RNAi oligonucleotide-lipid conjugates via subcutaneous injection.

[0318] FIG. 17 provides a schematic of RNAi oligonucleotide-lipid conjugates targeting TUBB3 where the oligonucleotide comprises a P-4, P-6, or P-8 truncated sense strand (i.e. a 6, 8, and 10 nucleotide overhang of the antisense strand) (Compounds 131-133) or a p-4, p-6, or p-8 truncated sense strand comprising phosphorothioate linkages (Compounds 134-136).

[0319] FIGS. 18A-18F provide graphs measuring percent (%) of murine TUBB3 mRNA remaining in frontal cortex (FIG. 18A), hippocampus (FIG. 18B), cerebellum (FIG. 18C), lumbar dorsal root ganglion (DRG) (FIG. 18D), medulla (FIG. 18E), and lumbar spinal cord (SC) (FIG. 18F) of control mice (aCSF) or mice administered Compounds 131-136 (respectively Parent C16, P-4, P-6, P-8, P-4 PS, P-6 PS, and P-8 PS) via lumbar intrathecal injection.

[0320] FIG. 19 provides a schematic of blunt-end RNAi oligonucleotide-lipid conjugates targeting TUBB3 where the oligonucleotide comprises a sense strand with different amounts of locked nucleic acids (LNA) (Compounds 137-140) or a P-6 truncated sense strand (i.e., an 8 nucleotide overhang of the antisense strand) comprising different amounts of LNAs (Compounds 141-145).

[0321] FIGS. 20A-20F provide graphs measuring percent (%) of murine TUBB3 mRNA remaining in frontal cortex (FIG. 20A), hippocampus (FIG. 20B), cerebellum (FIG. 20C), medulla (FIG. 20D), lumbar dorsal root ganglion (DRG) (FIG. 20E), and lumbar spinal cord (SC) (FIG. 20F) of control mice (aCSF) or mice administered Compounds 1 and 137-145 (respectively B-K) via lumbar intrathecal injection.

[0322] FIG. 21 provides a schematic of blunt-end RNAi oligonucleotide-lipid conjugates targeting TUBB3 where the oligonucleotide comprises a sense strand comprising different amounts of locked nucleic acids (LNA) (Compounds 138, 139, 140, 147, and 148).

[0323] FIGS. 22A-22F provide graphs measuring percent (%) of murine TUBB3 mRNA remaining in frontal cortex (FIG. 22A), hippocampus (FIG. 22B), medulla (FIG. 22C), lumbar dorsal root ganglion (DRG) (FIG. 22D), cerebellum (FIG. 22E), and lumbar spinal cord (SC) (FIG. 22F) of control mice (aCSF) or mice administered Compounds 1, 137, 146, 138, 139, 140, 147, and 148 (respectively B-I) via lumbar intrathecal injection.

[0324] FIG. 23 provides a schematic of blunt-end RNAi oligonucleotide-lipid conjugates targeting TUBB3 where the oligonucleotide comprises a P-4 truncated sense strand comprising different amounts of locked nucleic acids (LNA) (Compounds 149-154).

[0325] FIGS. 24A-24F provide graphs measuring percent (%) of murine TUBB3 mRNA remaining in frontal cortex (FIG. 24A), hippocampus (FIG. 24B), medulla (FIG. 24C), lumbar dorsal root ganglion (DRG) (FIG. 24D), cerebellum (FIG. 24E), and lumbar spinal cord (SC) (FIG. 24F) of control mice (aCSF) or mice administered Compounds 1, 137 and 149-154 (respectively B-I) via lumbar intrathecal injection.

[0326] FIG. 25 provides a schematic of blunt-end RNAi oligonucleotide-lipid conjugates targeting TUBB3 where the oligonucleotide comprises a P-8 truncated sense strand comprising different amounts of locked nucleic acids (LNA) (Compounds 155-160).

[0327] FIGS. 26A-26F provide graphs measuring percent (%) of murine TUBB3 mRNA remaining in frontal cortex (FIG. 26A), hippocampus (FIG. 26B), medulla (FIG. 26C), lumbar dorsal root ganglion (DRG) (FIG. 26D), cerebellum (FIG. 26E), and lumbar spinal cord (SC) (FIG. 26F) of control mice (aCSF) or mice administered Compounds 1, 137 and 155-160 (respectively B-I) via lumbar intrathecal injection.

[0328] FIG. 27 provides a schematic of blunt-end RNAi oligonucleotide-lipid conjugates targeting UGT8 where the oligonucleotide comprises a sense strand comprising different amounts of locked nucleic acids (LNA) (Compounds 162-165) or a P-6 truncated sense strand comprising different amounts of LNAs (Compounds 166-171).

[0329] FIGS. 28A-28F provide graphs measuring percent (%) of murine UGT8 mRNA remaining in frontal cortex (FIG. 28A), hippocampus (FIG. 28B), hypothalamus (FIG. 28C), cerebellum (FIG. 28D), medulla (FIG. 28E), and lumbar spinal cord (FIG. 26F) of control mice (aCSF) or mice administered Compounds 161-171 (respectively B-L) via lumbar intrathecal injection.

[0330] FIG. 29 provides a schematic of blunt-end RNAi oligonucleotide-lipid conjugates targeting GFAP where the oligonucleotide comprises a sense strand comprising different amounts of locked nucleic acids (LNA) (Compounds 173-176) or a P-6 truncated sense strand comprising different amounts of LNAs (Compounds 177-182).

[0331] FIGS. 30A-30F provide graphs measuring percent (%) of murine GFAP mRNA remaining in frontal cortex (FIG. 30A), hippocampus (FIG. 30B), cerebellum (FIG. 30C), medulla (FIG. 30D), hypothalamus (FIG. 30E), and lumbar spinal cord (FIG. 30F) of control mice (aCSF) or mice administered Compounds 172-182 (respectively B-L) via lumbar intrathecal injection.

[0332] FIGS. 31A-31D provide schematics of blunt-end RNAi oligonucleotide-lipid conjugates targeting TUBB3 where the oligonucleotide comprises different sense strand truncations including: no truncation (FIG. 31A; Compounds 137 and 183-190); a P-4 truncated sense strand (FIG. 31B; Compounds 149, and 191-194); a P-6 truncated sense strand (FIG. 31C; Compounds 141, 195, and 196); and, a P-8 truncated sense strand (FIG. 31D; Compound 197). Each compound comprises a C16 lipid conjugated to a different position of the sense strand as indicated in the schematics.

[0333] FIGS. 32A-32F provide graphs measuring percent (%) of murine TUBB3 mRNA remaining in frontal cortex (FIG. 32A), hippocampus (FIG. 32B), medulla (FIG. 32C), lumbar dorsal root ganglion (FIG. 32D), cerebellum (FIG. 32E), and lumbar spinal cord (FIG. 32F) of control mice (aCSF) or mice administered Compounds 137, 183-190, 149, 191-194, 141, and 195-197 via lumbar intrathecal injection.

[0334] FIGS. 33A-33C provide schematics of RNAi oligonucleotide-lipid conjugates targeting GFAP mRNA having the structures of Compounds 173, 176, 180, 200-205, and 207-215.

[0335] FIGS. 34A-34D provide graphs measuring percent (%) of murine GFAP mRNA remaining in frontal cortex (FIG. 34A), hippocampus (FIG. 34B), medulla (FIG. 34C), and lumbar spinal cord (FIG. 34D) of control mice (aCSF) or mice administered compounds 173, 176, 180, 200-205, and 207-215 (as identified in Table 20) via lumbar intrathecal injection.

[0336] FIGS. 35A-35E provide schematics of RNAi oligonucleotide-lipid conjugates targeting TUBB3 mRNA having the structures of Compounds 137, 140, 144, 217-222, 224-232, and 277-285.

[0337] FIGS. 36A-36D provide graphs measuring percent (%) of murine TUBB3 mRNA remaining in frontal cortex (FIG. 34A), hippocampus (FIG. 34B), medulla (FIG. 34C), and lumbar spinal cord (FIG. 34D) of control mice (aCSF) or mice administered compounds 137, and 140, 144, 217-222, 224-232 (as identified in Table 21) via lumbar intrathecal injection.

[0338] FIG. 36E is a graph measuring (%) of murine TUBB3 mRNA remaining in frontal cortex hippocampus, hypothalamus, cerebellum, brain stem, and lumbar spinal cord of control mice (aCSF) or mice administered compounds 140, 277-278, 231, and 279-285 (respectively B-L) via lumbar intrathecal injection.

[0339] FIGS. 37A-37B provide schematics of RNAi oligonucleotide-lipid conjugates targeting GFAP mRNA having the structures of Compounds 173, 176, and 233-245.

[0340] FIGS. 38A-38D provide graphs measuring percent (%) of murinc GFAP mRNA remaining in frontal cortex (FIG. 38A), hippocampus (FIG. 38B), medulla (FIG. 38C), and lumbar spinal cord (FIG. 38D) of control mice (aCSF) or mice administered compounds 173, 176, and 233-245 (respectively B-P) via lumbar intrathecal injection.

[0341] FIGS. 39A-39B provide schematics of RNAi oligonucleotide-lipid conjugates targeting GFAP mRNA having the structures of Compounds 173, 176, 200 and 246-255.

[0342] FIGS. 40A-40D provide graphs measuring percent (%) of murine GFAP mRNA remaining in frontal cortex (FIG. 40A), hippocampus (FIG. 40B), medulla (FIG. 40C), and lumbar spinal cord (FIG. 40D) of control mice (aCSF) or mice administered compounds 173, 176, 200 and 246-255 (respectively B-N) via lumbar intrathecal injection.

[0343] FIGS. 41A-41B provide schematics of RNAi oligonucleotide-lipid conjugates targeting TUBB3 mRNA having the structures of Compounds 137, 140, and 257-268.

[0344] FIGS. 42A-42D provide graphs measuring percent (%) of murine TUBB3 mRNA remaining in frontal cortex (FIG. 42A), hippocampus (FIG. 42B), medulla (FIG. 42C), and lumbar spinal cord (FIG. 42D) of control mice (aCSF) or mice administered compounds 137, 140, and 257-268 (respectively B-P) via lumbar intrathecal injection.

[0345] FIGS. 43A-43B provide schematics of RNAi oligonucleotide-lipid conjugates targeting TUBB3 mRNA having the structures of Compounds 137, 140, 217, and 269-276.

[0346] FIGS. 44A-44D provide graphs measuring percent (%) of murine TUBB3 mRNA remaining in frontal cortex (FIG. 44A), hippocampus (FIG. 44B), medulla (FIG. 44C), and lumbar spinal cord (FIG. 44D) of control mice (aCSF) or mice administered compounds 137, 140, 217, and 269-276 (respectively B-F and I-N) via lumbar intrathecal injection.

[0347] FIG. 45 provides schematics of RNAi oligonucleotide-lipid conjugates targeting GFAP mRNA having the structures of Compounds 286-292.

[0348] FIGS. 46A-46D provide graphs measuring percent (%) of murine ALDH2 mRNA remaining in liver (FIG. 46A), quadricep (quad) muscle (FIG. 46B), heart muscle (FIG. 46C), and gonadal white adipose tissue (gWAT) (FIG. 46D) of control mice (PBS) or mice administered compounds 286-292 (respectively A-G) via subcutaneous injection.

[0349] FIG. 47 provides schematics of RNAi oligonucleotide-lipid conjugates targeting UGT8 mRNA having the structures of Compounds 162, 167, 293, and 294.

[0350] FIGS. 48A-48D provide graphs measuring percent (%) of murine UGT8 mRNA remaining in frontal cortex (FIG. 48A), hippocampus (FIG. 48B), brain stem (FIG. 48C), and lumbar spinal cord (FIG. 48D) of control mice (aCSF) or mice administered compounds 162, 167, 293, and 294 (respectively blunt, 5′ p-6, 3′ p-3, and 5′ p-6 & 3′ p-3) via lumbar intrathecal injection.

[0351] FIGS. 49A-49F provide graphs depicting the concentration response of a GalNAc-conjugated oligonucleotide targeting the astrocyte-specific gene GFAP. The percent (%) of murine Gfap mRNA remaining in cervical spinal cord (FIG. 49A), thoracic spinal cord (FIG. 49B), lumbar spinal cord (FIG. 49C), frontal cortex (FIG. 49D), hippocampus (FIG. 49E), and cerebellum (FIG. 49F) of mice after treatment with GalNAc-conjugated Gfap oligonucleotide (Table 29) was determined. Mice were treated with 10, 32, 100, 320, or 1000 μg the GalNAc-conjugated Gfap oligonucleotide formulated in artificial cerebrospinal fluid (aCSF) via intrathecal injection into the lumbar spine. Seven (7) days following intrathecal injection, the level of Gfap mRNA was normalized to Ribosomal Protein L23 (RPL23) mRNA and overall expression was determined between tissue types relative to control mice treated with aCSF.

[0352] FIG. 50 provides a graph depicting the average percent (%) of murine Gfap mRNA remaining in different tissues of the central nervous system (CNS) based on the results in FIGS. 49A-49F and the resulting EC₅₀ (ED₅₀) calculated for each CNS tissue.

[0353] FIGS. 51A-51D provide graphs depicting the concentration-response of a GalNAc-conjugated Gfap oligonucleotide. The percent (%) of murine Gfap mRNA remaining in frontal cortex (FIG. 51A), brain stem (FIG. 51B), hippocampus (FIG. 51C), and lumbar spinal cord (FIG. 51D), of mice after treatment with GalNAc-conjugated Gfap oligonucleotide (Table 29) was determined. Mice were treated with 10, 32, 100, or 300 μg of the oligonucleotide formulated in artificial cerebrospinal fluid (aCSF) via intracerebroventricular (i.c.v) injection. Seven (7) days following i.c.v. injection, the level of Gfap mRNA was normalized to Ribosomal Protein L23 (RPL23) mRNA and overall expression was determined between tissue types relative to control mice treated with aCSF.

[0354] FIG. 52 provides a graph depicting the average percent (%) of murine Gfap mRNA remaining in different tissues of the CNS based on the results in FIGS. 51A-51D and the resulting EC₅₀ (ED₅₀) calculated for each CNS tissue.

[0355] FIGS. 53A-53B provide graphs depicting the percent (%) of rat Gfap mRNA remining in tissues of the central nervous system of rats after treatment with C16 lipid-conjugated (FIG. 53A) or GalNAc-conjugated “GalXC” (FIG. 53B) Gfap tetraloop oligonucleotides. Rats were treated with 1000 μg of the indicated Gfap oligonucleotides in Table 30 formulated in artificial cerebrospinal fluid (aCSF) via intrathecal injection to the lumbar spine. At 8, 12, or 23 weeks post administration, the level of Gfap mRNA was normalized to peptidylprolyl Isomerase B (Ppib) mRNA and overall expression was determined between tissue types relative to control rats treated with aCSF.

[0356] FIG. 54 provides a graph depicting the percent (%) of rat Gfap mRNA remining in tissues of the central nervous system of rats after treatment with a C16 lipid-conjugated Gfap tetraloop oligonucleotide. Rats were treated with 1000 μg of the indicated Gfap lipid-conjugated tetraloop oligonucleotide in Table 30 formulated in artificial cerebrospinal fluid (aCSF) via intracisternal magna injection. At 4- or 12-weeks post administration, the level of Gfap mRNA was normalized to peptidylprolyl Isomerase B (Ppib) mRNA and overall expression was determined between tissue types relative to control rats treated with aCSF.

[0357] FIGS. 55A-55B provide graphs depicting the percent (%) of rat Gfap mRNA remining in tissues of the central nervous system of rats after treatment with a C16 lipid-conjugated Gfap tetraloop oligonucleotide. Rats were treated with 1000 μg of the indicated Gfap lipid-conjugated tetraloop oligonucleotide in Table 30 formulated in artificial cerebrospinal fluid (aCSF) via intracisternal magna injection. At 26 weeks (FIG. 55A) or 39 weeks (FIG. 55B) post administration, the level of Gfap mRNA was normalized to peptidylprolyl Isomerase B (Ppib) mRNA and overall expression was determined between tissue types relative to control rats treated with aCSF.

[0358] FIGS. 56A-56F provide graphs depicting the percent (%) of murine Gfap mRNA remaining in lumbar spinal cord (FIG. 56A), medulla (FIG. 56B), cerebellum (FIG. 56C), hypothalamus (FIG. 56D), hippocampus (FIG. 56E), and frontal cortex (FIG. 56F) of mice after treatment with Gfap tetraloop oligonucleotides having a lipid conjugated at a nucleotide position indicated on the x-axis. Mice were treated with 300 μg of the indicated Gfap lipid-conjugated tetraloop oligonucleotides in Table 31 formulated in artificial cerebrospinal fluid (aSCF) via intrathecal (i.t.) injection. Seven (7) days post dose, the level of Gfap mRNA was normalized to Ribosomal Protein L23 (RPL23) mRNA and overall expression was determined between tissue types relative to control mice treated with aCSF.

[0359] FIGS. 57A-57F provide graphs depicting the percent (%) of murine Gfap mRNA remaining in lumbar spinal cord (FIG. 57A), medulla (FIG. 57B), cerebellum (FIG. 57C), hypothalamus (FIG. 57D), hippocampus (FIG. 57E), and frontal cortex (FIG. 57F) of mice after treatment with Gfap blunt-end or tetraloop oligonucleotides having a lipid conjugated at a nucleotide position indicated on the x-axis. Mice were treated with 300 μg of the indicated C16 lipid-conjugated Gfap oligonucleotides in Table 32 formulated in artificial cerebrospinal fluid (aCSF) via intrathecal injection into the lumbar spine. Seven (7) days following intrathecal injection, the level of Gfap mRNA was normalized to Ribosomal Protein L23 (RPL23) mRNA and overall expression was determined between tissue types relative to control mice treated with aCSF.

[0360] FIGS. 58A-58F provide graphs depicting the percent (%) of murine Gfap mRNA remaining in lumbar spinal cord (FIG. 58A), medulla (FIG. 58B), cerebellum (FIG. 58C), hypothalamus (FIG. 58D), hippocampus (FIG. 58E), and frontal cortex (FIG. 58F) of mice after treatment with lipid-conjugated Gfap blunt-end or tetraloop oligonucleotides as assessed in FIGS. 56A-56F and 57A-57F. Experiment 1 represents the oligonucleotides assessed in FIGS. 56A-56F. Experiment 2 represents the tetraloop oligonucleotides assessed in FIGS. 57A-57F. Experiment 3 represents the blunt-end oligonucleotides assessed in FIGS. 57A-57F.

[0361] FIGS. 59A-59B provide graphs depicting the concentration response of C16-conjugated Gfap blunt-end oligonucleotides. The percent (%) of murine Gfap mRNA remaining in the CNS of mice after treatment with a C16-conjugated Gfap blunt-end oligonucleotide. Mice were treated with 3, 10, 30, 100, or 300 μg of the indicated oligonucleotide formulated in artificial cerebrospinal fluid (aCSF) via intrathecal injection into the lumbar spine. Seven (7) days (FIG. 59A) and 28-days (FIG. 59B) following intrathecal injection, the level of Gfap mRNA was normalized to Ribosomal Protein L23 (RPL23) mRNA and overall expression and ED₅₀ was determined between tissue types relative to control mice treated with aCSF.

[0362] FIG. 60 provides a graph depicting the concentration response of GalNAc-conjugated UGT8 oligonucleotides. The percent (%) of human UGT8 mRNA remaining in the liver of mice exogenously expressing human UGT8 (hydrodynamic injection model) after treatment with GalNAc-conjugated UGT8 oligonucleotides (Table 34) at two concentrations (0.3 mg/kg and 1 mg/kg) was measured. Three days following administration, mice were hydrodynamically injected (HDI) with a DNA plasmid encoding human UGT8. The level of human UGT8 mRNA was determined from livers collected 18 hours later. The x-axis indicates the oligonucleotide administered and the concentration (e.g., administration of UGT8-277 at 0.3 mg/kg is shown as “277-0.3”).

[0363] FIGS. 61A-61F provide graphs depicting the concentration response of a UGT8 oligonucleotide having a 2′OMe tetraloop in the central nervous system (CNS). The percent (%) of murine UGT8 mRNA remaining in lumbar spinal cord (FIG. 61A), cervical spinal cord (FIG. 61B), brainstem (FIG. 61C), cerebellum (FIG. 61D), hypothalamus (FIG. 61E), and frontal cortex (FIG. 61F) was determined. Mice were treated with 10, 32, 100, 320, or 500 μg of UGT8-277 oligonucleotide formulated in artificial cerebrospinal fluid (aCSF) via intrathecal (i.t.) injection was measured. Seven (7) days following intrathecal injection, the level of UGT8 mRNA was measured and normalized to Ribosomal Protein L23 (RPL23) mRNA and overall expression was determined between tissue types relative to control mice treated with (aCSF). ‘GalXC-UGT8’ refers to UGT8-277 oligonucleotide having SEQ ID NO: 841 (sense strand) and SEQ ID NO: 831 (antisense strand).

[0364] FIG. 62 provides a graph depicting the percent (%) murine UGT8 mRNA remaining in different tissues of the central nervous system (CNS) based on the results in FIGS. 61A-61F.

[0365] FIGS. 63A-63D provide graphs depicting the percent (%) murine UGT8 mRNA remaining in lumbar spinal cord (FIG. 63A), medulla (FIG. 63B), hippocampus (FIG. 63C), and frontal cortex (FIG. 63D) of mice after treatment with lipid-conjugated UGT8 tetraloop oligonucleotides. Mice were treated with 300 μg of the indicated UGT8 lipid-conjugated tetraloop oligonucleotides in Table 35 formulated in artificial cerebrospinal fluid (aCSF) via intrathecal (i.t.) injection into the lumbar spine. Seven (7) days following intrathecal injection, the level of UGT8 mRNA was normalized to Ribosomal Protein L23 (RPL23) mRNA and overall expression was determined between tissue types relative to control mice treated with (aCSF).

[0366] FIG. 64 provides schematics of UGT8 lipid-conjugated blunt-end oligonucleotides having the structures of the compounds in Table 36. The nucleotide position on the sense strand having a conjugated lipid is indicated as “P #”, e.g., a lipid conjugated at position 2 of the sense strand from 5′ to 3′ is indicated as “P2”.

[0367] FIGS. 65A-65D provide graphs depicting the percent (%) murine UGT8 mRNA remaining in lumbar spinal cord (FIG. 65A), medulla (FIG. 65B), hippocampus (FIG. 65C), and frontal cortex (FIG. 65D) of mice after treatment with the lipid-conjugated UGT8 blunt-end oligonucleotides of FIG. 64. Mice were treated with 300 μg of the indicated UGT8 lipid-conjugated blunt-end oligonucleotides in Table 36 formulated in artificial cerebrospinal fluid (aCSF) via intrathecal injection into the lumbar spine. Seven (7) days following intrathecal injection, the level of UGT8 mRNA was normalized to Ribosomal Protein L23 (RPL23) mRNA and overall expression was determined between tissue types relative to control mice treated with (aCSF).

[0368] FIGS. 66A-66B provide schematics of UGT8 lipid-conjugated blunt-end oligonucleotides having the structures of the compounds in Table 37. The nucleotide position on the sense strand having a conjugated lipid is indicated as “P #”, e.g., a lipid conjugated at position 1 of the sense strand from 5′ to 3′ is indicated as “P1”.

[0369] FIGS. 67A-67E provide graphs depicting the percent (%) murine UGT8 mRNA remaining in frontal cortex (FIG. 67A), hippocampus (FIG. 67B), hypothalamus (FIG. 67C), brainstem (FIG. 67D), and lumbar spinal cord (FIG. 67E) of mice after treatment with lipid-conjugated UGT8 blunt-end oligonucleotides. Mice were treated with 300 μg of the indicated UGT8 lipid-conjugated blunt-end oligonucleotides in Table 37 formulated in artificial cerebrospinal fluid (aCSF) via intrathecal injection into the lumbar spine. Twenty-eight (28) days following intrathecal injection, the level of UGT8 mRNA was normalized to Ribosomal Protein L23 (RPL23) mRNA and overall expression was determined between tissue types relative to control mice treated with (aCSF).

### DETAILED DESCRIPTION

[0370] In some aspects, the disclosure provides oligonucleotide-lipid conjugates (e.g., RNAi oligonucleotide-lipid conjugates) that reduce expression of a target gene. In other aspects, the disclosure provides methods of treating a disease or disorder associated with expression of a target gene. In other aspects, the disclosure provides methods of treating a disease or disorder (e.g., a neurological disease and/or by inappropriate gene expression) associated with expression of a target gene using the lipid-conjugated RNAi oligonucleotides, or pharmaceutically acceptable compositions thereof, described herein. In other aspects, the disclosure provides methods of using the lipid-conjugated RNAi oligonucleotides described herein in the manufacture of a medicament for treating a disease or disorder associated with expression of a target gene.

[0371] In nucleic acid chemistry, many different artificial nucleic acids have been developed to alter the behavior of siRNAs under physiological conditions. In particular, phosphorothioate (PS), 2′-methoxy (2′-OMe), and 2′-fluoro nucleic acid have often been used to modify the siRNA its behavior, toxicity and thermostability. Recently a novel class of conformationally restricted artificial nucleic acids has been developed these are bridged nucleic acids (BNAs). The basic structure of the BNA is the bridged structure between 2′-O and 4′-C which fixes the furanose ring to the N-type and 2′,4′-BNA gives its nucleotide analog high nuclease resistance and affinity to complementary RNA. The concept of introducing a bulky group at the 2′-position of the furanose ring to achieve high nuclease resistance has little impact on sugar fluctuation, whereas in the BNAs, the bicyclic structure provides steric hindrance at the phosphodiester backbone and the reduction of entropic loss by the sugar fluctuation, and thus both high nuclease resistance and stabilization of the RNA duplex are realized. Many studies related to usage of 2′,4′-BNA/locked nucleic acid (LNA) modifications in siRNAs have been conducted in vitro. Similarly, locked nucleic acids (LNA's) are a class of nucleic acid analogues that display increased hybridization affinity towards complementary DNA and RNA sequences and that as such they are also useful in the design of RNAi trigger structures. Structural studies have shown LNA to be an RNA mimic, fitting seamlessly into an A-type duplex geometry. Several reports have revealed LNA as a most promising molecule for the development of oligonucleotide-based therapeutics.

[0372] According to the current disclosure the thermostability provided by LNA's and BNA's allow modifications of underlying RNAi structures. For example, significant truncations in the passenger/sense strand of a given trigger can be made and with the appropriate addition and use of LNA's or BNA's the gene knockdown activity of every shorter passenger strands can be rescued. The result is a LNS enhanced RNAi trigger that is lighter in weight with the equivalent activity in physiological systems. Similarly, phosphorothioate molecules can be used to control or lessen nuclease attack on a given RNAi trigger structure. In this sense the chemical modification of a given RNAi trigger can be a balancing act between those modifications such as LNA, BNA or Phosphorothioate (PS) placement to protect against nuclease degradation or loss of thermostability.

### Lipid-Conjugated RNAi Oligonucleotides

[0373] The disclosure provides, inter alia, lipid-conjugated RNAi oligonucleotides (e.g., RNAi oligonucleotide-lipid conjugates) that reduce expression of a target gene. In some embodiments, a lipid-conjugated RNAi oligonucleotide provided by the disclosure is targeted to an mRNA encoding the target gene. Messenger RNA (mRNA) that encodes a target gene and is targeted by a lipid-conjugated RNAi oligonucleotide of the disclosure is referred to herein as “target mRNA”.

mRNA Target Sequences

[0374] In some embodiments, the lipid-conjugated RNAi oligonucleotide is targeted to a target sequence comprising a target mRNA. In some embodiments, the lipid-conjugated RNAi oligonucleotide is targeted to a target sequence within a target mRNA. In some embodiments, the lipid-conjugated RNAi oligonucleotide, or a portion, fragment, or strand thereof (e.g., an antisense strand or a guide strand of a double-stranded oligonucleotide) binds or anneals to a target sequence comprising a target mRNA, thereby reducing target gene expression. In some embodiments, the lipid-conjugated RNAi oligonucleotide is targeted to a target sequence comprising target mRNA for the purpose of reducing expression of a target gene in vivo. In some embodiments, the amount or extent of reduction of target gene expression by a lipid-conjugated RNAi oligonucleotide targeted to a specific target sequence correlates with the potency of the lipid-conjugated RNAi oligonucleotide. In some embodiments, the amount or extent of reduction of target gene expression by a lipid-conjugated RNAi oligonucleotide targeted to a specific target sequence correlates with the amount or extent of therapeutic benefit in a subject or patient having a disease, disorder or condition associated with target gene expression treated with the lipid-conjugated RNAi oligonucleotide.

[0375] Through examination of the nucleotide sequence of mRNAs encoding target genes, including mRNAs of multiple different species (e.g., human, cynomolgus monkey, mouse, and rat) and as a result of in vitro and in vivo testing, it has been discovered that certain nucleotide sequences and certain systemic modifications to those oligonucleotides are more amenable than others to RNAi oligonucleotide-mediated reduction and are thus useful as part of oligonucleotides that are otherwise targeted to specific gene target sequences. In some embodiments, a sense strand of a lipid-conjugated RNAi oligonucleotide, or a portion or fragment thereof, described herein, comprises a nucleotide sequence that is similar (e.g., having no more than 4 mismatches) or is identical to a target sequence comprising a target mRNA. In some embodiments, a portion or region of the sense strand of a double-stranded oligonucleotide described herein comprises a target sequence comprising a target mRNA.

[0376] In some embodiments, the target mRNA is expressed in a tissue or cell of a subject. In some embodiments, the target mRNA is expressed in more than one tissue or cell of a subject, wherein the tissues or cells are different. In some embodiments, the target mRNA is differentially expressed in a tissue or cell. In some embodiments, the target mRNA is expressed throughout multiple tissue types and/or cell types. In some embodiments, the target mRNA is expressed in the central nervous system, liver tissue, ocular tissue, adipose tissue, adrenal tissue, or skeletal muscle tissue. In some embodiments, the target mRNA is expressed in the central nervous system, peripherial nervous system, liver tissue, ocular tissue, adipose tissue, adrenal tissue, heart tissue, lung tissue, skeletal muscle tissue, cardiac muscle tissue, smooth muscle tissue, or kidney tissue, or any combination thereof. In some embodiments, the target mRNA is expressed in the central nervous system. In some embodiments, the target mRNA is expressed in the peripherial nervous system. In some embodiments, the target mRNA is expressed in a region of the central nervous system. In some embodiments, a region of the central nervous system is selected from the eye, brain, cerebrum, cerebral cortex, frontal lobe, frontal cortex, parietal lobe, temporal lobe, occipital lobe, hippocampus, cerebellum, brain stem, dorsal root ganglion (DRG) or the spinal cord. In some embodiments, the target mRNA is expressed in a neuron. In some embodiments, the target mRNA is expressed in a glial cell. In some embodiments, the target mRNA is expressed in a neuron located in the central nervous system. In some embodiments, the target mRNA is expressed in liver tissue. In some embodiments, the target mRNA is expressed in a hepatocyte. In some embodiments, the target mRNA is expressed in a liver sinusoidal endothelial cell. In some embodiments, the target mRNA is expressed in a macrophage. In some embodiments, the target mRNA is expressed in a macrophage located in liver tissue. In some embodiments, the target mRNA is expressed in ocular tissue. In some embodiments, the target mRNA is expressed in the retina and/or optic nerve. In some embodiments, the target mRNA is expressed in adipose tissue. In some embodiments, the target mRNA is expressed in skeletal muscle tissue. In some embodiments, the target mRNA is expressed in adrenal tissue. In some embodiments, the target mRNA is expressed in heart tissue. In some embodiments, the target mRNA is expressed in lung tissue. In some embodiments, the target mRNA is expressed in the eye. In some embodiments, the target mRNA is expressed in the brain. In some embodiments, the target mRNA is expressed in the cerebrum. In some embodiments, the target mRNA is expressed in the cerebellum. In some embodiments, the target mRNA is expressed in the brain stem. In some embodiments, the target mRNA is expressed in the frontal lobe. In some embodiments, the target mRNA is expressed in the frontal cortex. In some embodiments, the target mRNA is expressed in the parietal lobe. In some embodiments, the target mRNA is expressed in the temporal lobe. In some embodiments, the target mRNA is expressed in the occipital lobe. In some embodiments, the target mRNA is expressed in the hippocampus. In some embodiments, the target mRNA is expressed in the DRG. In some embodiments, the target mRNA is expressed in the spinal cord.

### RNAi Oligonucleotide Targeting Sequences

[0377] In some embodiments, the lipid-conjugated RNAi oligonucleotides provided by the disclosure comprise a targeting sequence. As used herein, the term “targeting sequence” refers to a nucleotide sequence having a region of complementarity to a specific nucleotide sequence comprising an mRNA. In some embodiments, the lipid-conjugated RNAi oligonucleotides provided by the disclosure comprise a gene targeting sequence having a region of complementarity to a nucleotide sequence comprising a target sequence of a target mRNA.

[0378] The targeting sequence imparts the lipid-conjugated RNAi oligonucleotide with the ability to specifically target an mRNA by binding or annealing to a target sequence comprising a target mRNA by complementary (Watson-Crick) base pairing. In some embodiments, the lipid-conjugated RNAi oligonucleotides herein (or a strand thereof, e.g., an antisense strand or a guide strand of a double-stranded oligonucleotide) comprise a targeting sequence having a region of complementarity that binds or anneals to a target sequence comprising a target mRNA by complementary (Watson-Crick) base pairing. In some embodiments, the lipid-conjugated RNAi oligonucleotides herein (or a strand thereof, e.g., an antisense strand or a guide strand of a double-stranded oligonucleotide) comprise a targeting sequence having a region of complementarity that binds or anneals to a target sequence within a target mRNA by complementary (Watson-Crick) base pairing. The targeting sequence is generally of suitable length and base content to enable binding or annealing of the lipid-conjugated RNAi oligonucleotide (or a strand thereof) to a specific target mRNA for purposes of inhibiting target gene expression. In some embodiments, the targeting sequence is at least about 12, at least about 13, at least about 14, at least about 15, at least about 16, at least about 17, at least about 18, at least about 19, at least about 20, at least about 21, at least about 22, at least about 23, at least about 24, at least about 25, at least about 26, at least about 27, at least about 28, at least about 29 or at least about 30 nucleotides in length. In some embodiments, the targeting sequence is at least 12, at least 13, at least 14, at least 15, at least 16, at least 17, at least 18, at least 19 or at least 20 nucleotides. In some embodiments, the targeting sequence is about 12 to about 30 (e.g., 12 to 30, 12 to 22, 15 to 25, 17 to 21, 18 to 27, 19 to 27, or 15 to 30) nucleotides in length. In some embodiments, the targeting sequence is about 12, 13, 14, 15, 16, 17, 18, 19, 20, 21, 22, 23, 24, 25, 26, 27, 28, 29 or 30 nucleotides in length. In some embodiments, the targeting sequence is 18 nucleotides in length. In some embodiments, the targeting sequence is 19 nucleotides in length. In some embodiments, the targeting sequence is 20 nucleotides in length. In some embodiments, the targeting sequence is 21 nucleotides in length. In some embodiments, the targeting sequence is 22 nucleotides in length. In some embodiments, the targeting sequence is 23 nucleotides in length. In some embodiments, the targeting sequence is 24 nucleotides in length.

[0379] In some embodiments, the lipid-conjugated RNAi oligonucleotides herein comprise a targeting sequence that is fully complementary to a target sequence comprising a target mRNA. In some embodiments, the lipid-conjugated RNAi oligonucleotides herein comprise a targeting sequence that is fully complementary to a target sequence within a target mRNA. In some embodiments, the targeting sequence is partially complementary to a target sequence comprising a target mRNA. In some embodiments, the targeting sequence is partially complementary to a target sequence within a target mRNA. In some embodiments, the targeting sequence comprises a region of contiguous nucleotides comprising the antisense strand.

[0380] In some embodiments, the lipid-conjugated RNAi oligonucleotides herein comprise a targeting sequence that is complementary to a contiguous sequence of nucleotides comprising a target mRNA, wherein the contiguous sequence of nucleotides is about 12 to about 30 nucleotides in length (e.g., 12 to 30, 12 to 28, 12 to 26, 12 to 24, 12 to 20, 12 to 18, 12 to 16, 14 to 22, 16 to 20, 18 to 20 or 18 to 19 nucleotides in length). In some embodiments, the lipid-conjugated RNAi oligonucleotides comprise a targeting sequence that is complementary to a contiguous sequence of nucleotides comprising a target mRNA, wherein the contiguous sequence of nucleotides is 10, 11, 12, 13, 14, 15, 16, 17, 18, 19 or 20 nucleotides in length. In some embodiments, the lipid-conjugated RNAi oligonucleotides comprise a targeting sequence that is complementary to a contiguous sequence of nucleotides comprising a target mRNA, wherein the contiguous sequence of nucleotides is 15 nucleotides in length. In some embodiments, the lipid-conjugated RNAi oligonucleotides comprise a targeting sequence that is complementary to a contiguous sequence of nucleotides comprising a target mRNA, wherein the contiguous sequence of nucleotides is 19 nucleotides in length.

[0381] In some embodiments, the lipid-conjugated RNAi oligonucleotide comprises a targeting sequence that is complementary to a contiguous sequence of nucleotides comprising a target mRNA, wherein the contiguous sequence of nucleotides is 15 nucleotides in length. In some embodiments, the lipid-conjugated RNAi oligonucleotide comprises a targeting sequence that is complementary to a contiguous sequence of nucleotides comprising a target mRNA, wherein the contiguous sequence of nucleotides is 19 nucleotides in length.

[0382] In some embodiments, a targeting sequence of a lipid-conjugated RNAi oligonucleotide herein is fully complementary (e.g., having no mismatches) to a target sequence comprising a target mRNA and comprises the entire length of an antisense strand. In some embodiments, a targeting sequence of a lipid-conjugated RNAi oligonucleotide herein is fully complementary (e.g., having no mismatches) to a target sequence comprising a target mRNA and comprises a portion of the entire length of an antisense strand. In some embodiments, a targeting sequence of a lipid-conjugated RNAi oligonucleotide herein is fully complementary (e.g., having no mismatches) to a target sequence comprising a target mRNA and comprises 10 to 20 nucleotides of the antisense strand. In some embodiments, a targeting sequence of a lipid-conjugated RNAi oligonucleotide herein is fully complementary (e.g., having no mismatches) to a target sequence comprising a target mRNA and comprises 15 to 19 nucleotides of the antisense strand. In some embodiments, a targeting sequence of a lipid-conjugated RNAi oligonucleotide herein is fully complementary (e.g., having no mismatches) to a target sequence comprising a target mRNA and comprises 12 nucleotides, 13 nucleotides, 14 nucleotides, 15 nucleotides, 16 nucleotides, 17 nucleotides, 18 nucleotides, 19 nucleotides, 20 nucleotides, 21 nucleotides, or 22 nucleotides of the antisense strand. In some embodiments, a targeting sequence of a lipid-conjugated RNAi oligonucleotide herein is fully complementary (e.g., having no mismatches) to a target sequence comprising a target mRNA and comprises 19 nucleotides of the antisense strand.

[0383] In some embodiments, a targeting sequence of a lipid-conjugated RNAi oligonucleotide herein is partially complementary (e.g., having no more than 4 mismatches) to a target sequence comprising a target mRNA and comprises the entire length of an antisense strand. In some embodiments, a targeting sequence of a lipid-conjugated RNAi oligonucleotide herein is partially complementary (e.g., having no more than 4 mismatches) to a target sequence comprising a target mRNA and comprises a portion of the entire length of an antisense strand. In some embodiments, a targeting sequence of a lipid-conjugated RNAi oligonucleotide herein is partially complementary (e.g., having no more than 4 mismatches) to a target sequence comprising a target mRNA and comprises 10 to 20 nucleotides of the antisense strand. In some embodiments, a targeting sequence of a lipid-conjugated RNAi oligonucleotide herein is partially complementary (e.g., having no more than 4 mismatches) to a target sequence comprising a target mRNA and comprises 15 to 19 nucleotides of the antisense strand. In some embodiments, a targeting sequence of a lipid-conjugated RNAi oligonucleotide herein is partially complementary (e.g., having no more than 4 mismatches) to a target sequence comprising a target mRNA and comprises 12 nucleotides, 13 nucleotides, 14 nucleotides, 15 nucleotides, 16 nucleotides, 17 nucleotides, 18 nucleotides, 19 nucleotides, 20 nucleotides, 21 nucleotides, or 22 nucleotides of the antisense strand. In some embodiments, a targeting sequence of a lipid-conjugated RNAi oligonucleotide herein is partially complementary (e.g., having no more than 4 mismatches) to a target sequence comprising a target mRNA and comprises 19 nucleotides of the antisense strand.

[0384] In some embodiments, a lipid-conjugated RNAi oligonucleotide herein comprises a targeting sequence having one or more base pair (bp) mismatches with the corresponding target sequence comprising a target mRNA. In some embodiments, the targeting sequence has a 1 bp mismatch, a 2 bp mismatch, a 3 bp mismatch, a 4 bp mismatch, or a 5 bp mismatch with the corresponding target sequence comprising a target mRNA provided that the ability of the targeting sequence to bind or anneal to the target sequence under appropriate hybridization conditions and/or the ability of the lipid-conjugated RNAi oligonucleotide to inhibit or reduce target gene expression is maintained (e.g., under physiological conditions). Alternatively, in some embodiments, the targeting sequence comprises no more than 1, no more than 2, no more than 3, no more than 4, or no more than 5 bp mismatches with the corresponding target sequence comprising a target mRNA provided that the ability of the targeting sequence to bind or anneal to the target sequence under appropriate hybridization conditions and/or the ability of the lipid-conjugated RNAi oligonucleotide to inhibit or reduce target gene expression is maintained. In some embodiments, the lipid-conjugated RNAi oligonucleotide comprises a targeting sequence having 1 mismatch with the corresponding target sequence. In some embodiments, the lipid-conjugated RNAi oligonucleotide comprises a targeting sequence having 2 mismatches with the corresponding target sequence. In some embodiments, the lipid-conjugated RNAi oligonucleotide comprises a targeting sequence having 3 mismatches with the corresponding target sequence. In some embodiments, the lipid-conjugated RNAi oligonucleotide comprises a targeting sequence having 4 mismatches with the corresponding target sequence. In some embodiments, the lipid-conjugated RNAi oligonucleotide comprises a targeting sequence having 5 mismatches with the corresponding target sequence. In some embodiments, the lipid-conjugated RNAi oligonucleotide comprises a targeting sequence having more than one mismatch (e.g., 2, 3, 4, 5 or more mismatches) with the corresponding target sequence, wherein at least 2 (e.g., all) of the mismatches are positioned consecutively (e.g., 2, 3, 4, 5 or more mismatches in a row), or wherein the mismatches are interspersed in any position throughout the targeting sequence. In some embodiments, the lipid-conjugated RNAi oligonucleotide comprises a targeting sequence having more than one mismatch (e.g., 2, 3, 4, 5 or more mismatches) with the corresponding target sequence, wherein at least 2 (e.g., all) of the mismatches are positioned consecutively (e.g., 2, 3, 4, 5 or more mismatches in a row), or wherein at least one or more non-mismatched base pair is located between the mismatches, or a combination thereof.

### Types of Oligonucleotides

[0385] A variety of RNAi oligonucleotide types and/or structures are useful for reducing target gene expression in the methods herein. Any of the RNAi oligonucleotide types described herein or elsewhere are contemplated for use as a framework to incorporate a targeting sequence herein for the purposes of inhibiting or reducing corresponding target gene expression.

[0386] In some embodiments, the lipid-conjugated RNAi oligonucleotides herein inhibit target gene expression by engaging with RNA interference (RNAi) pathways upstream or downstream of Dicer involvement. For example, RNAi oligonucleotides have been developed with each strand having sizes of about 19-25 nucleotides with at least one 3′ overhang of 1 to 5 nucleotides (see, e.g., U.S. Pat. No. 8,372,968). Longer oligonucleotides also have been developed that are processed by Dicer to generate active RNAi products (see, e.g., U.S. Pat. No. 8,883,996). Further work produced extended double-stranded oligonucleotides where at least one end of at least one strand is extended beyond a duplex targeting region, including structures where one of the strands includes a thermodynamically stabilizing tetraloop structure (see, e.g., U.S. Pat. Nos. 8,513,207 and 8,927,705, as well as Intl. Patent Application Publication No. WO 2010/033225). Such structures may include single-stranded extensions (on one or both sides of the molecule) as well as double-stranded extensions.

[0387] In some embodiments, the RNAi oligonucleotides conjugates herein engage with the RNAi pathway downstream of the involvement of Dicer (e.g., Dicer cleavage). In some embodiments, the oligonucleotides described herein are Dicer substrates. In some embodiments, the oligonucleotides herein interact with Dicer and are loaded into RISC. In some embodiments, upon endogenous Dicer processing, double-stranded nucleic acids of 19-23 nucleotides in length capable of reducing expression of a target mRNA are produced. In some embodiments, the lipid-conjugated RNAi oligonucleotide has an overhang (e.g., of 1, 2, or 3 nucleotides in length) in the 3′ end of the sense strand. In some embodiments, the lipid-conjugated RNAi oligonucleotide (e.g., siRNA conjugate) comprises a 21-nucleotide guide strand that is antisense to a target mRNA and a complementary passenger strand, in which both strands anneal to form a 19-bp duplex and 2 nucleotide overhangs at either or both 3′ ends. Longer oligonucleotide designs also are contemplated including oligonucleotides having a guide strand of 23 nucleotides and a passenger strand of 21 nucleotides, where there is a blunt end on the right side of the molecule (3′ end of passenger strand/5′ end of guide strand) and a two nucleotide 3′-guide strand overhang on the left side of the molecule (5′ end of the passenger strand/3′ end of the guide strand). In such molecules, there is a 21 bp duplex region. See, e.g., U.S. Pat. Nos. 9,012,138; 9,012,621; 9,193,753; 8,420,391; and, 8,552,171 all to Tuschl et al. Such patents also indicate a lack of activity with regard to double overhang constructs.

[0388] In some embodiments, the RNAi oligonucleotides conjugates disclosed herein comprise sense and antisense strands that are both in the range of about 17 to 26 (e.g., 17 to 26, 20 to 25 or 21-23) nucleotides in length. In some embodiments, the lipid-conjugated RNAi oligonucleotides disclosed herein comprise a sense and antisense strand that are both in the range of about 19-22 nucleotides in length. In some embodiments, the sense and antisense strands are of equal length. In some embodiments, the lipid-conjugated RNAi oligonucleotides disclosed herein comprise sense and antisense strands, such that there is a 3′-overhang on either the sense strand or the antisense strand, or both the sense and antisense strand. In some embodiments, for lipid-conjugated RNAi oligonucleotides that have sense and antisense strands that are both in the range of about 21-23 nucleotides in length, a 3′ overhang on the sense, antisense, or both sense and antisense strands is 1 or 2 nucleotides in length. In some embodiments, a lipid-conjugated RNAi oligonucleotide has a guide strand of 22 nucleotides and a passenger strand of 20 nucleotides, where there is a blunt end on the right side of the molecule (3′ end of passenger strand/5′ end of guide strand) and a 2 nucleotide 3′-guide strand overhang on the left side of the molecule (5′ end of the passenger strand/3′ end of the guide strand). In such molecules, there is a 20 bp duplex region.

[0389] Other RNAi oligonucleotide designs for use with the compositions and methods herein include: 16-mer siRNAs (see, e.g., Nucleic Acids in Chemistry and Biology, Blackburn (ed.), ROYAL SOCIETY OF CHEMISTRY, 2006), shRNAs (e.g., having 19 bp or shorter stems; see, e.g., Moore et al. (2010) METHODS MOL. BIOL. 629:141-58), blunt siRNAs (e.g., of 19 bps in length; see, e.g., Kraynack & Baker (2006) RNA 12:163-76), asymmetrical siRNAs (aiRNA; see, e.g., Sun et al. (2008) NAT. BIOTECHNOL. 26:1379-82), asymmetric shorter-duplex siRNA (see, e.g., Chang et al. (2009) MOL. THER. 17:725-32), fork siRNAs (see, e.g., Hohjoh (2004) FEBS Lett. 557:193-98), and small internally segmented interfering RNA (siRNA; see, e.g., Bramsen et al. (2007) NUCLEIC ACIDS RES. 35:5886-97). Further non-limiting examples of an oligonucleotide structure that may be used in some embodiments to reduce or inhibit the expression of a target gene are microRNA (miRNA), short hairpin RNA (shRNA) and short siRNA (see, e.g., Hamilton et al. (2002) EMBO J. 21:4671-79; see also, US Patent Application Publication No. 2009/0099115).

### Antisense Strands

[0390] In some embodiments, an antisense strand of a lipid-conjugated RNAi oligonucleotide is referred to as a “guide strand.” For example, an antisense strand that engages with RNA-induced silencing complex (RISC) and binds to an Argonaute protein such as Ago2, or engages with or binds to one or more similar factors, and directs silencing of a target gene, the antisense strand is referred to as a guide strand. In some embodiments, a sense strand complementary to a guide strand is referred to as a “passenger strand.”

[0391] In some embodiments, a lipid-conjugated RNAi oligonucleotide herein comprises an antisense strand of up to about 50 nucleotides in length (e.g., up to 50, up to 40, up to 35, up to 30, up to 27, up to 25, up to 21, up to 19, up to 17, up to 15, or up to 8 nucleotides in length). In some embodiments, a lipid-conjugated RNAi oligonucleotide herein comprises an antisense strand of at least about 12 nucleotides in length (e.g., at least 12, at least 15, at least 19, at least 21, at least 22, at least 25, at least 27, at least 30, at least 35 or at least 38 nucleotides in length). In some embodiments, a herein comprises an antisense strand in a range of about 8 to about 40 (e.g., 8 to 40, 8 to 36, 8 to 32, 8 to 28, 15 to 40, 15 to 36, 15 to 32, 15 to 30, 15 to 28, 17 to 22, 17 to 25, 19 to 27, 19 to 30, 20 to 40, 22 to 40, 25 to 40 or 32 to 40) nucleotides in length. In some embodiments, a lipid-conjugated RNAi oligonucleotide herein comprises an antisense strand of 15 to 30 nucleotides in length. In some embodiments, a lipid-conjugated RNAi oligonucleotide herein comprises an antisense strand of 12 to 30 nucleotides in length. In some embodiments, an antisense strand of any one of the lipid-conjugated RNAi oligonucleotide disclosed herein is of 12, 13, 14, 15, 16, 17, 18, 19, 20, 21, 22, 23, 24, 25, 26, 27, 28, 29, 30, 31, 32, 33, 34, 35, 36, 37, 38, 39 or 40 nucleotides in length. In some embodiments, a lipid-conjugated RNAi oligonucleotide comprises an antisense strand of 19-23 nucleotides in length. In some embodiments, a lipid-conjugated RNAi oligonucleotide comprises an antisense strand of 19 nucleotides in length. In some embodiments, a lipid-conjugated RNAi oligonucleotide comprises an antisense strand of 20 nucleotides in length. In some embodiments, a lipid-conjugated RNAi oligonucleotide comprises an antisense strand of 21 nucleotides in length. In some embodiments, a lipid-conjugated RNAi oligonucleotide comprises an antisense strand of 22 nucleotides in length. In some embodiments, a lipid-conjugated RNAi oligonucleotide comprises an antisense strand of 23 nucleotides in length.

### Sense Strands

[0392] In some embodiments, a lipid-conjugated RNAi oligonucleotide disclosed herein comprises a sense strand (or passenger strand) of up to about 50 nucleotides in length (e.g., up to 50, up to 40, up to 36, up to 30, up to 27, up to 25, up to 21, up to 19, up to 17 or up to 12 nucleotides in length). In some embodiments, a lipid-conjugated RNAi oligonucleotide herein comprises a sense strand of at least about 12 nucleotides in length (e.g., at least 12, at least 15, at least 19, at least 21, at least 25, at least 27, at least 30, at least 36 or at least 38 nucleotides in length). In some embodiments, a lipid-conjugated RNAi oligonucleotide herein comprises a sense strand of at least about 10 nucleotides in length (e.g., at least 10, at least 12, at least 15, at least 19, at least 21, at least 25, at least 27, at least 30, at least 36 or at least 38 nucleotides in length). In some embodiments, a lipid-conjugated RNAi oligonucleotide herein comprises a sense strand in a range of about 12 to about 50 (e.g., 12 to 50, 12 to 40, 12 to 36, 12 to 32, 12 to 28, 15 to 40, 15 to 36, 15 to 32, 15 to 28, 17 to 21, 17 to 25, 19 to 27, 19 to 30, 20 to 40, 22 to 40, 25 to 40 or 32 to 40) nucleotides in length. In some embodiments, a lipid-conjugated RNAi oligonucleotide herein comprises a sense strand in a range of about 10 to about 50 (e.g., 10 to 50, 12 to 50, 12 to 40, 12 to 36, 12 to 32, 12 to 28, 15 to 40, 15 to 36, 15 to 32, 15 to 28, 17 to 21, 17 to 25, 19 to 27, 19 to 30, 20 to 40, 22 to 40, 25 to 40 or 32 to 40) nucleotides in length. In some embodiments, a lipid-conjugated RNAi oligonucleotide herein comprises a sense strand 15 to 50 nucleotides in length. In some embodiments, a lipid-conjugated RNAi oligonucleotide herein comprises a sense strand 18 to 38 nucleotides in length. In some embodiments, a lipid-conjugated RNAi oligonucleotide herein comprises a sense strand of 12, 13, 14, 15, 16, 17, 18, 19, 20, 21, 22, 23, 24, 25, 26, 27, 28, 29, 30, 31, 32, 33, 34, 35, 36, 37, 38, 39, 40, 41, 42, 43, 44, 45, 46, 47, 48, 49, or 50 nucleotides in length. In some embodiments, a lipid-conjugated RNAi oligonucleotide herein comprises a sense strand of 12-21 nucleotides in length. In some embodiments, a lipid-conjugated RNAi oligonucleotide herein comprises a sense strand of 10 nucleotides in length. In some embodiments, a lipid-conjugated RNAi oligonucleotide herein comprises a sense strand of 11 nucleotides in length. In some embodiments, a lipid-conjugated RNAi oligonucleotide herein comprises a sense strand of 12 nucleotides in length. In some embodiments, a lipid-conjugated RNAi oligonucleotide herein comprises a sense strand of 13 nucleotides in length. In some embodiments, a lipid-conjugated RNAi oligonucleotide herein comprises a sense strand of 14 nucleotides in length. In some embodiments, a lipid-conjugated RNAi oligonucleotide herein comprises a sense strand of 15 nucleotides in length. In some embodiments, a lipid-conjugated RNAi oligonucleotide herein comprises a sense strand of 16 nucleotides in length. In some embodiments, a lipid-conjugated RNAi oligonucleotide herein comprises a sense strand of 17 nucleotides in length. In some embodiments, a lipid-conjugated RNAi oligonucleotide herein comprises a sense strand of 18 nucleotides in length. In some embodiments, a lipid-conjugated RNAi oligonucleotide herein comprises a sense strand of 19 nucleotides in length. In some embodiments, a lipid-conjugated RNAi oligonucleotide herein comprises a sense strand of 20 nucleotides in length. In some embodiments, a lipid-conjugated RNAi oligonucleotide herein comprises a sense strand of 21 nucleotides in length. In some embodiments, a lipid-conjugated RNAi oligonucleotide herein comprises a sense strand of 22 nucleotides in length. In some embodiments, a lipid-conjugated RNAi oligonucleotide herein comprises a sense strand of 23 nucleotides in length. In some embodiments, a lipid-conjugated RNAi oligonucleotide herein comprises a sense strand of 24 nucleotides in length. In some embodiments, a lipid-conjugated RNAi oligonucleotide herein comprises a sense strand of 25 nucleotides in length. In some embodiments, a lipid-conjugated RNAi oligonucleotide herein comprises a sense strand of 26 nucleotides in length. In some embodiments, a lipid-conjugated RNAi oligonucleotide herein comprises a sense strand of 27 nucleotides in length. In some embodiments, a lipid-conjugated RNAi oligonucleotide herein comprises a sense strand of 28 nucleotides in length. In some embodiments, a lipid-conjugated RNAi oligonucleotide herein comprises a sense strand of 29 nucleotides in length. In some embodiments, a lipid-conjugated RNAi oligonucleotide herein comprises a sense strand of 30 nucleotides in length. In some embodiments, a lipid-conjugated RNAi oligonucleotide herein comprises a sense strand of 31 nucleotides in length. In some embodiments, a lipid-conjugated RNAi oligonucleotide herein comprises a sense strand of 32 nucleotides in length. In some embodiments, a lipid-conjugated RNAi oligonucleotide herein comprises a sense strand of 33 nucleotides in length. In some embodiments, a lipid-conjugated RNAi oligonucleotide herein comprises a sense strand of 34 nucleotides in length. In some embodiments, a lipid-conjugated RNAi oligonucleotide herein comprises a sense strand of 35 nucleotides in length. In some embodiments, a lipid-conjugated RNAi oligonucleotide herein comprises a sense strand of 36 nucleotides in length. In some embodiments, a lipid-conjugated RNAi oligonucleotide herein comprises a sense strand of 37 nucleotides in length. In some embodiments, a lipid-conjugated RNAi oligonucleotide herein comprises a sense strand of 38 nucleotides in length.

[0393] In some embodiments, a sense strand comprises a stem-loop structure at its 3′ end. In some embodiments, a sense strand comprises a stem-loop structure at its 5′ end. In some embodiments, the stem-loop is formed by intrastrand base pairing. In some embodiments, a sense strand comprises a stem-loop structure at its 5′ end. In some embodiments, a stem is a duplex of 1, 2, 3, 4, 5, 6, 7, 8, 9, 10, 11, 12, 13 or 14 nucleotides in length. In some embodiments, the stem of the stem-loop comprises a duplex of 1 nucleotide in length. In some embodiments, the stem of the stem-loop comprises a duplex of 2 nucleotides in length. In some embodiments, the stem of the stem-loop comprises a duplex of 3 nucleotides in length. In some embodiments, the stem of the stem-loop comprises a duplex of 4 nucleotides in length. In some embodiments, the stem of the stem-loop comprises a duplex of 5 nucleotides in length. In some embodiments, the stem of the stem-loop comprises a duplex of 6 nucleotides in length. In some embodiments, the stem of the stem-loop comprises a duplex of 7 nucleotides in length. In some embodiments, the stem of the stem-loop comprises a duplex of 8 nucleotides in length. In some embodiments, the stem of the stem-loop comprises a duplex of 9 nucleotides in length. In some embodiments, the stem of the stem-loop comprises a duplex of 10 nucleotides in length. In some embodiments, the stem of the stem-loop comprises a duplex of 11 nucleotides in length. In some embodiments, the stem of the stem-loop comprises a duplex of 12 nucleotides in length. In some embodiments, the stem of the stem-loop comprises a duplex of 13 nucleotides in length. In some embodiments, the stem of the stem-loop comprises a duplex of 14 nucleotides in length.

[0394] In some embodiments, a stem-loop provides the lipid-conjugated RNAi oligonucleotide protection against degradation (e.g., enzymatic degradation), facilitates or improves targeting and/or delivery to a target cell, tissue, or organ, or both. For example, in some embodiments, the loop of a stem-loop provides nucleotides comprising one or more modifications that facilitate, improve, or increase targeting to a target mRNA (e.g., a target mRNA expressed in the CNS), inhibition of target gene expression, and/or delivery to a target cell, tissue, or organ (e.g., the CNS), or a combination thereof. In some embodiments, the stem-loop itself or modification(s) to the stem-loop do not substantially affect the inherent gene expression inhibition activity of the lipid-conjugated RNAi oligonucleotide, but facilitates, improves, or increases stability (e.g., provides protection against degradation) and/or delivery of the lipid-conjugated RNAi oligonucleotide to a target cell, tissue, or organ (e.g., the CNS). In certain embodiments, a lipid-conjugated RNAi oligonucleotide herein comprises a sense strand comprising (e.g., at its 3′ end) a stem-loop set forth as: S1-L-S2, in which S1 is complementary to S2, and in which L forms a single-stranded loop between S1 and S2 of up to about 10 nucleotides in length (e.g., 3, 4, 5, 6, 7, 8, 9 or 10 nucleotides in length). In some embodiments, the loop (L) is 3 nucleotides in length. In some embodiments, the loop (L) is 4 nucleotides in length.

[0395] In some embodiments, the tetraloop comprises the sequence 5′-GAAA-3′. In some embodiments, the tetraloop comprises the sequence 5′-UNCG-3′. In some embodiments, the tetraloop comprises the sequence 5′-UACG-3′. In some embodiments, the stem loop comprises the sequence 5′-GCAGCCGAAAGGCUGC-3′ (SEQ ID NO: 526).

[0396] In some embodiments, a loop (L) of a stem-loop having the structure S1-L-S2 as described above is a triloop. In some embodiments, the triloop comprises ribonucleotides, deoxyribonucleotides, modified nucleotides, delivery ligands, and combinations thereof.

[0397] In some embodiments, a loop (L) of a stem-loop having the structure S1-L-S2 as described above is a tetraloop (e.g., within a nicked tetraloop structure). In some embodiments, the tetraloop comprises ribonucleotides, deoxyribonucleotides, modified nucleotides, delivery ligands, and combinations thereof.

[0398] In some embodiments, a loop (L) of a stem-loop having the structure S1-L-S2 as described above is a tetraloop as described in U.S. Pat. No. 10,131,912, incorporated herein by reference (e.g., within a nicked tetraloop structure).

### Duplex Length

[0399] In some embodiments, a duplex formed between a sense and antisense strand is at least 8 (e.g., at least 10, at least 11, at least 12, at least 13, at least 14, at least 15, or at least 16) nucleotides in length. In some embodiments, a duplex formed between a sense and antisense strand is at least 12 (e.g., at least 15, at least 16, at least 17, at least 18, at least 19, at least 20, or at least 21) nucleotides in length. In some embodiments, a duplex formed between a sense and antisense strand is in the range of 12-30 nucleotides in length (e.g., 12 to 30, 12 to 27, 12 to 22, 15 to 25, 18 to 30, 18 to 22, 18 to 25, 18 to 27, 18 to 30, 19 to 30 or 21 to 30 nucleotides in length). In some embodiments, a duplex formed between a sense and antisense strand is in the range of 10-30 nucleotides in length (e.g., 10 to 30, 12 to 30, 12 to 27, 12 to 22, 15 to 25, 18 to 30, 18 to 22, 18 to 25, 18 to 27, 18 to 30, 19 to 30 or 21 to 30 nucleotides in length). In some embodiments, a duplex formed between a sense and antisense strand is 12, 13, 14, 15, 16, 17, 18, 19, 29, 21, 22, 23, 24, 25, 26, 27, 28, 29 or 30 nucleotides in length. In some embodiments, a duplex formed between a sense and antisense strand is 10, 11, 12, 13, 14, 15, 16, 17, 18, 19, 29, 21, 22, 23, 24, 25, 26, 27, 28, 29 or 30 nucleotides in length. In some embodiments, a duplex formed between a sense and antisense strand is 10-18 base pairs in length. In some embodiments, a duplex formed between a sense and antisense strand is 15-30 base pairs in length. In some embodiments, a duplex formed between a sense and antisense strand is 17-21 base pairs in length. In some embodiments, a duplex formed between a sense and antisense strand is 10 base pairs in length. In some embodiments, a duplex formed between a sense and antisense strand is 11 base pairs in length. In some embodiments, a duplex formed between a sense and antisense strand is 12 base pairs in length. In some embodiments, a duplex formed between a sense and antisense strand is 13 base pairs in length. In some embodiments, a duplex formed between a sense and antisense strand is 14 base pairs in length. In some embodiments, a duplex formed between a sense and antisense strand is 15 base pairs in length. In some embodiments, a duplex formed between a sense and antisense strand is 16 base pairs in length. In some embodiments, a duplex formed between a sense and antisense strand is 17 base pairs in length. In some embodiments, a duplex formed between a sense and antisense strand is 18 base pairs in length. In some embodiments, a duplex formed between a sense and antisense strand is 19 base pairs in length. In some embodiments, a duplex formed between a sense and antisense strand is 20 base pairs in length. In some embodiments, a duplex formed between a sense and antisense strand is 21 base pairs in length. In some embodiments, a duplex formed between a sense and antisense strand does not span the entire length of the sense strand and/or antisense strand. In some embodiments, a duplex between a sense and antisense strand spans the entire length of either the sense or antisense strands. In some embodiments, a duplex between a sense and antisense strand spans the entire length of both the sense strand and the antisense strand.

### Oligonucleotide Ends

[0400] In some embodiments, a lipid-conjugated RNAi oligonucleotide disclosed herein comprises sense and antisense strands, such that there is a 3′-overhang on either the sense strand or the antisense strand, or both the sense and antisense strand. In some embodiments, a lipid-conjugated RNAi oligonucleotide herein has one 5′ end that is thermodynamically less stable compared to the other 5′ end. In some embodiments, an asymmetric lipid-conjugated RNAi oligonucleotide conjugate is provided that includes a blunt end at the 3′ end of a sense strand and overhang at the 3′ end of the antisense strand. In some embodiments, a 3′ overhang on an antisense strand is 1-4 nucleotides in length (e.g., 1, 2, 3, or 4 nucleotides in length).

[0401] In some embodiments, the 3′-overhang is about one (1) to twenty (20) nucleotides in length (e.g., about 1, 2, 3, 4, 5, 6, 7, 8, 9, 10, 11, 12, 13, 14, 15, 16, 17, 18, 19, or about 20 nucleotides in length). In some embodiments, the 3′ overhang is about one (1) to nineteen (19), one (1) to eighteen (18), one (1) to seventeen (17), one (1) to sixteen (16), one (1) to fifteen (15), one (1) to fourteen (14), one (1) to thirteen (13), one (1) to twelve (12), one (1) to eleven (11), one (1) to ten (10), one (1) to nine (9), one (1) to eight (8), one (1) to seven (7), one (1) to six (6), one (1) to five (5), one (1) to four (4), one (1) to three (3), or about one (1) to two (2) nucleotides in length. In some embodiments, the 3′-overhang is about two (2) to about twelve (12) nucleotides in length. In some embodiments, the 3′-overhang is (1) nucleotide in length. In some embodiments, the 3′-overhang is two (2) nucleotides in length. In some embodiments, the 3′-overhang is three (3) nucleotides in length. In some embodiments, the 3′-overhang is four (4) nucleotides in length. In some embodiments, the 3′-overhang is five (5) nucleotides in length. In some embodiments, the 3′-overhang is six (6) nucleotides in length. In some embodiments, the 3′-overhang is seven (7) nucleotides in length. In some embodiments, the 3′-overhang is eight (8) nucleotides in length. In some embodiments, the 3′-overhang is nine (9) nucleotides in length. In some embodiments, the 3′-overhang is ten (10) nucleotides in length. In some embodiments, the 3′-overhang is eleven (11) nucleotides in length. In some embodiments, the 3′-overhang is twelve (12) nucleotides in length. In some embodiments, the 3′-overhang is thirteen (13) nucleotides in length. In some embodiments, the 3′-overhang is fourteen (14) nucleotides in length. In some embodiments, the 3′-overhang is fifteen (15) nucleotides in length. In some embodiments, the 3′-overhang is sixteen (16) nucleotides in length. In some embodiments, the 3′-overhang is seventeen (17) nucleotides in length. In some embodiments, the 3′-overhang is eighteen (18) nucleotides in length. In some embodiments, the 3′-overhang is nineteen (19) nucleotides in length. In some embodiments, the 3′-overhang is twenty (20) nucleotides in length.

[0402] Typically, an oligonucleotide for RNAi has a two (2) nucleotide overhang on the 3′ end of the antisense (guide) strand. However, other overhangs are possible. In some embodiments, an overhang is a 3′ overhang comprising a length of between one and four nucleotides, optionally one to four, one to three, one to two, two to four, two to three, or one, two, three, or four nucleotides. In some embodiments, the overhang is a 5′ overhang comprising a length of between one and four nucleotides, optionally one to four, one to three, one to two, two to four, two to three, or one, two, three, or four nucleotides.

[0403] In some embodiments, an oligonucleotide herein comprises a sense strand and an antisense strand, wherein the 5′ terminus of either or both strands comprise a 5′-overhang comprising one or more nucleotides. In some embodiments, an oligonucleotide herein comprises a sense strand and an antisense strand, wherein the sense strand comprises a 5′-overhang comprising one or more nucleotides. In some embodiments, an oligonucleotide herein comprises a sense strand and an antisense strand, wherein the antisense strand comprises a 5′-overhang comprising one or more nucleotides. In some embodiments, an oligonucleotide herein comprises a sense strand and an antisense strand, wherein both the sense strand and the antisense strand comprises a 5′-overhang comprising one or more nucleotides.

[0404] In some embodiments, the 5′-overhang is about one (1) to twenty (20) nucleotides in length (e.g., about 1, 2, 3, 4, 5, 6, 7, 8, 9, 10, 11, 12, 13, 14, 15, 16, 17, 18, 19, or about 20 nucleotides in length). In some embodiments, the 5′ overhang is about one (1) to nineteen (19), one (1) to eighteen (18), one (1) to seventeen (17), one (1) to sixteen (16), one (1) to fifteen (15), one (1) to fourteen (14), one (1) to thirteen (13), one (1) to twelve (12), one (1) to eleven (11), one (1) to ten (10), one (1) to nine (9), one (1) to eight (8), one (1) to seven (7), one (1) to six (6), one (1) to five (5), one (1) to four (4), one (1) to three (3), or about one (1) to two (2) nucleotides in length. In some embodiments, the 5′-overhang is (1) nucleotide in length. In some embodiments, the 5′-overhang is two (2) nucleotides in length. In some embodiments, the 5′-overhang is three (3) nucleotides in length. In some embodiments, the 5′-overhang is four (4) nucleotides in length. In some embodiments, the 5′-overhang is five (5) nucleotides in length. In some embodiments, the 5′-overhang is six (6) nucleotides in length. In some embodiments, the 5′-overhang is seven (7) nucleotides in length. In some embodiments, the 5′-overhang is eight (8) nucleotides in length. In some embodiments, the 5′-overhang is nine (9) nucleotides in length. In some embodiments, the 5′-overhang is ten (10) nucleotides in length. In some embodiments, the 5′-overhang is eleven (11) nucleotides in length. In some embodiments, the 5′-overhang is twelve (12) nucleotides in length. In some embodiments, the 5′-overhang is thirteen (13) nucleotides in length. In some embodiments, the 5′-overhang is fourteen (14) nucleotides in length. In some embodiments, the 5′-overhang is fifteen (15) nucleotides in length. In some embodiments, the 5′-overhang is sixteen (16) nucleotides in length. In some embodiments, the 5′-overhang is seventeen (17) nucleotides in length. In some embodiments, the 5′-overhang is eighteen (18) nucleotides in length. In some embodiments, the 5′-overhang is nineteen (19) nucleotides in length. In some embodiments, the 5′-overhang is twenty (20) nucleotides in length.

[0405] In some embodiments, the 5′ overhang is 2 nucleotides and the 3′ overhang is about 3-7 nucleotides. In some embodiments, the 5′ overhang is 2 nucleotides and the 3′ overhang is 3 nucleotides. In some embodiments, the 5′ overhang is 2 nucleotides and the 3′ overhang is 4 nucleotides. In some embodiments, the 5′ overhang is 2 nucleotides and the 3′ overhang is 5 nucleotides. In some embodiments, the 5′ overhang is 2 nucleotides and the 3′ overhang is 6 nucleotides. In some embodiments, the 5′ overhang is 2 nucleotides and the 3′ overhang is 7 nucleotides.

[0406] In some embodiments, the 3′ overhang is 6-8 nucleotides and the 5′ overhang is 2-4 nucleotides. In some embodiments, the 3′ overhang is 6 nucleotides and the 5′ overhang is 2 nucleotides. In some embodiments, the 3′ overhang is 6 nucleotides and the 5′ overhang is 3 nucleotides. In some embodiments, the 3′ overhang is 6 nucleotides and the 5′ overhang is 4 nucleotides. In some embodiments, the 3′ overhang is 7 nucleotides and the 5′ overhang is 2 nucleotides. In some embodiments, the 3′ overhang is 7 nucleotides and the 5′ overhang is 3 nucleotides. In some embodiments, the 3′ overhang is 7 nucleotides and the 5′ overhang is 4 nucleotides. In some embodiments, the 3′ overhang is 8 nucleotides and the 5′ overhang is 2 nucleotides. In some embodiments, the 3′ overhang is 8 nucleotides and the 5′ overhang is 3 nucleotides. In some embodiments, the 3′ overhang is 8 nucleotides and the 5′ overhang is 4 nucleotides. In some embodiments, one or more (e.g., 2, 3, or 4) terminal nucleotides of the 3′ end or 5′ end of a sense and/or antisense strand are modified. For example, in some embodiments, one or two terminal nucleotides of the 3′ end of the antisense strand are modified. In some embodiments, the last nucleotide at the 3′ end of an antisense strand is modified, e.g., comprises 2′ modification, e.g., a 2′-O-methoxyethyl. In some embodiments, the last one or two terminal nucleotides at the 3′ end of an antisense strand are complementary with the target. In some embodiments, the last one or two nucleotides at the 3′ end of the antisense strand are not complementary with the target.

[0407] In some embodiments, an RNAi oligonucleotide conjugate disclosed herein comprises a stem-loop structure at the 3′ end of the sense strand and comprises two terminal overhang nucleotides at the 3′ end of the antisense strand. In some embodiments, an RNAi oligonucleotide conjugate herein comprises a nicked tetraloop structure, wherein the 3′ end of the sense strand comprises a stem-tetraloop structure and comprises two terminal overhang nucleotides at the 3′ end of the antisense strand.

[0408] In some embodiments, an RNAi oligonucleotide conjugate disclosed herein comprises a stem-loop structure at the 5′ end of the sense strand and comprises an overhang nucleotides at the 3′ end of the antisense strand. In some embodiments, an RNAi oligonucleotide conjugate herein comprises a nicked tetraloop structure, wherein the 5′ end of the sense strand comprises a stem-tetraloop structure and comprises two terminal overhang nucleotides at the 3′ end of the antisense strand.

[0409] In some embodiments, an RNAi oligonucleotide conjugate disclosed herein comprises a stem-loop structure at the 5′ end of the sense strand and comprises a blunt end at the 5′ end of the antisense strand.

[0410] In some embodiments, an RNAi oligonucleotide conjugate disclosed herein comprises an overhang of 1-8 nucleotides at the 5′ end of the sense strand and comprises an overhang of 1-8 nucleotides at the 5′ end of the antisense strand.

[0411] In some embodiments, the overhang is selected from AA, GG, AG, and GA. In some embodiments, the overhang is AA. In some embodiments, the overhang is AG. In some embodiments, the overhang is GA. In some embodiments, the two terminal overhang nucleotides are GG. Typically, one or both of the two terminal GG nucleotides of the antisense strand are not complementary with the target.

[0412] In some embodiments, the 5′ end and/or the 3′ end of a sense or antisense strand has an inverted cap nucleotide.

[0413] In some embodiments, one or more (e.g., 2, 3, 4, 5, 6) modified internucleotide linkages are provided between terminal nucleotides of the 3′ end or 5′ end of a sense and/or antisense strand. In some embodiments, modified internucleotide linkages are provided between overhang nucleotides at the 3′ end or 5′ end of a sense and/or antisense strand.

[0414] In some embodiments, the sense strand is 18 nucleotides, and the antisense strand comprises a 5′ overhang of 2 nucleotides, and a 3′ overhang of 2 nucleotides. In some embodiments, the sense strand is 17 nucleotides, and the antisense strand comprises a 5′ overhang of 3 nucleotides, and a 3′ overhang of 2 nucleotides. In some embodiments, the sense strand is 16 nucleotides, and the antisense strand comprises a 5′ overhang of 4 nucleotides, and a 3′ overhang of 2 nucleotides. In some embodiments, the sense strand is 13 nucleotides, and the antisense strand comprises a 5′ overhang of 2 nucleotides, and a 3′ overhang of 7 nucleotides. In some embodiments, the sense strand is 12 nucleotides, and the antisense strand comprises a 5′ overhang of 2 nucleotides, and a 3′ overhang of 8 nucleotides. In some embodiments, the sense strand is 12 nucleotides, and the antisense strand comprises a 5′ overhang of 3 nucleotides, and a 3′ overhang of 7 nucleotides. In some embodiments, the sense strand is 10 nucleotides, and the antisense strand comprises a 5′ overhang of 1 nucleotide, and a 3′ overhang of 11 nucleotides.

[0415] In some embodiments, the sense strand is 18 nucleotides, the duplex region is 18 nucleotides, and the antisense strand comprises a 5′ overhang of 2 nucleotides, and a 3′ overhang of 2 nucleotides. In some embodiments, the sense strand is 17 nucleotides, the duplex region is 17 nucleotides, and the antisense strand comprises a 5′ overhang of 3 nucleotides, and a 3′ overhang of 2 nucleotides. In some embodiments, the sense strand is 16 nucleotides, the duplex region is 16 nucleotides, and the antisense strand comprises a 5′ overhang of 4 nucleotides, and a 3′ overhang of 2 nucleotides. In some embodiments, the sense strand is 13 nucleotides, the duplex region is 13 nucleotides, and the antisense strand comprises a 5′ overhang of 2 nucleotides, and a 3′ overhang of 7 nucleotides. In some embodiments, the sense strand is 12 nucleotides, the duplex region is 12 nucleotides, and the antisense strand comprises a 5′ overhang of 2 nucleotides, and a 3′ overhang of 8 nucleotides. In some embodiments, the sense strand is 12 nucleotides, the duplex region is 12 nucleotides, and the antisense strand comprises a 5′ overhang of 3 nucleotides, and a 3′ overhang of 7 nucleotides. In some embodiments, the sense strand is 10 nucleotides, the duplex region is 10 nucleotides, and the antisense strand comprises a 5′ overhang of 1 nucleotide, and a 3′ overhang of 11 nucleotides.

### Oligonucleotide Modifications

[0416] In some embodiments, an RNAi oligonucleotide conjugate disclosed herein comprises one or more modifications. Oligonucleotides (e.g., RNAi oligonucleotides) may be modified in various ways to improve or control specificity, stability, delivery, bioavailability, resistance from nuclease degradation, immunogenicity, base-pairing properties, RNA distribution and cellular uptake and other features relevant to therapeutic research use.

[0417] In some embodiments, the modification is a modified sugar. In some embodiments, the modification is a 5′-terminal phosphate group. In some embodiments, the modification is a modified internucleoside linkage. In some embodiments, the modification is a modified base. In some embodiments, an oligonucleotide described herein can comprise any one of the modifications described herein or any combination thereof. For example, in some embodiments, an oligonucleotide described herein comprises at least one modified sugar, a 5′-terminal phosphate group, at least one modified internucleoside linkage, and at least one modified base.

[0418] The number of modifications on an oligonucleotide (e.g., an RNAi oligonucleotide) and the position of those nucleotide modifications may influence the properties of an oligonucleotide. For example, oligonucleotides may be delivered in vivo by conjugating them to or encompassing them in a lipid nanoparticle (LNP) or similar carrier. However, when an oligonucleotide is not protected by an LNP or similar carrier, it may be advantageous for at least some of the nucleotides to be modified. Accordingly, in some embodiments, all or substantially all of the nucleotides of an oligonucleotides are modified. In some embodiments, more than half of the nucleotides are modified. In some embodiments, less than half of the nucleotides are modified. In some embodiments, the sugar moiety of all nucleotides comprising the oligonucleotide is modified at the 2′ position. In some embodiments, the sugar moiety of all nucleotides comprising the oligonucleotide is modified at the 2′ position, except for the nucleotide conjugated to a lipid (e.g., the 5′-terminal nucleotide of the sense strand). The modifications may be reversible or irreversible. In some embodiments, an oligonucleotide as disclosed herein has a number and type of modified nucleotides sufficient to cause the desired characteristics (e.g., protection from enzymatic degradation, capacity to target a desired cell after in vivo administration, and/or thermodynamic stability).

### Sugar Modifications

[0419] In some embodiments, a nucleotide modification in a sugar comprises a 2′-modification. In some embodiments, a 2′-modification may be 2′-O-propargyl, 2′-O-propylamin, 2′-amino, 2′-ethyl, 2′-fluoro (2′-F), 2′-aminoethyl (EA), 2′-O-methyl (2′-OMe), 2′-O-methoxyethyl (2′-MOE), 2′-O-[2-(methylamino)-2-oxoethyl] (2′-O-NMA) or 2′-deoxy-2′-fluoro-β-d-arabinonucleic acid (2′-FANA). In some embodiments, the modification is 2′-F, 2′-OMe or 2′-MOE. In some embodiments, a modification in a sugar comprises a modification of the sugar ring, which may comprise modification of one or more carbons of the sugar ring. For example, a modification of a sugar of a nucleotide may comprise a 2′-oxygen of a sugar is linked to a 1′-carbon or 4′-carbon of the sugar, or a 2′-oxygen is linked to the 1′-carbon or 4′-carbon via an ethylene or methylene bridge. In some embodiments, a modified nucleotide has an acyclic sugar that lacks a 2′-carbon to 3′-carbon bond. In some embodiments, a modified nucleotide has a thiol group, e.g., in the 4′ position of the sugar.

[0420] In some embodiments, a lipid-conjugated RNAi oligonucleotide described herein comprises at least about 1 modified nucleotide (e.g., at least 1, at least 5, at least 10, at least 15, at least 20, at least 25, at least 30, at least 35, at least 40, at least 45, at least 50, at least 55, at least 60, or more). In some embodiments, the sense strand of the lipid-conjugated RNAi oligonucleotide comprises at least about 1 modified nucleotide (e.g., at least 1, at least 5, at least 10, at least 15, at least 20, at least 25, at least 30, at least 35, or more). In some embodiments, the antisense strand of the lipid-conjugated RNAi oligonucleotide comprises at least about 1 modified nucleotide (e.g., at least 1, at least 5, at least 10, at least 15, at least 20, or more).

[0421] In some embodiments, all the nucleotides of the sense strand of the lipid-conjugated RNAi oligonucleotide are modified. In some embodiments, all the nucleotides of the antisense strand of the lipid-conjugated RNAi oligonucleotide are modified. In some embodiments, all the nucleotides of the lipid-conjugated RNAi oligonucleotide (i.e., both the sense strand and the antisense strand) are modified. In some embodiments, the modified nucleotide comprises a 2′-modification (e.g., a 2′-F or 2′-OMe, 2′-MOE, and 2′-deoxy-2′-fluoro-β-d-arabinonucleic acid).

[0422] In some embodiments, the disclosure provides lipid-conjugated RNAi oligonucleotides having different modification patterns. In some embodiments, the modified lipid-conjugated RNAi oligonucleotides comprise a sense strand sequence having a modification pattern as set forth in the Examples and Sequence Listing and an antisense strand having a modification pattern as set forth in the Examples and Sequence Listing.

[0423] In some embodiments, a lipid-conjugated RNAi oligonucleotide disclosed herein comprises an antisense strand having nucleotides that are modified with 2′-F. In some embodiments, a lipid-conjugated RNAi oligonucleotide disclosed herein comprises an antisense strand comprises nucleotides that are modified with 2′-F and 2′-OMe. In some embodiments, a lipid-conjugated RNAi oligonucleotide disclosed herein comprises a sense strand having nucleotides that are modified with 2′-F. In some embodiments, a lipid-conjugated RNAi oligonucleotide disclosed herein comprises a sense strand comprising nucleotides that are modified with 2′-F and 2′-OMe. In some embodiments, a lipid-conjugated RNAi oligonucleotide disclosed herein comprises a sense strand comprising nucleotides that are modified with 2′-F and 2′-OMe, provided that a nucleotide conjugated to a lipid moiety is not modified with 2′-F or 2′-OMe.

[0424] In some embodiments, an oligonucleotide described herein comprises a sense strand with about 10-25%, 10%, 11%, 12%, 13%, 14% 15%, 16%, 17%, 18%, 19% or 20% of the nucleotides of the sense strand comprising a 2′-fluoro modification. In some embodiments, about 11% of the nucleotides of the sense strand comprise a 2-fluoro modification. In some embodiments, about 20% of the nucleotides of the sense strand comprise a 2-fluoro modification. In some embodiments, an oligonucleotide described herein comprises an antisense strand with about 25-35%, 25%, 26%, 27%, 28%, 29%, 30%, 31%, 32%, 33%, 34% or 35% of the nucleotides of the antisense strand comprising a 2′-fluoro modification. In some embodiments, about 32% of the nucleotides of the antisense strand comprise a 2′-fluoro modification. In some embodiments, the oligonucleotide has about 15-25%, 15%, 16%, 17%, 18%, 19%, 20%, 21%, 22%, 23%, 24%, or 25% of its nucleotides comprising a 2′-fluoro modification. In some embodiments, about 19% of the nucleotides in the oligonucleotide comprise a 2′-fluoro modification. In some embodiments, about 26% of the nucleotides in the oligonucleotide comprise a 2′-fluoro modification.

[0425] In some embodiments, one or more of positions 8, 9, 10 or 11 of the sense strand is modified with a 2′-F group. In some embodiments, one or more nucleotides forming a base pair with a nucleotide at one or more of positions 10-13 of the antisense strand, is modified with a 2′-F group. In some embodiments, the sugar moiety at each of nucleotides not modified with a 2′-F group or conjugated to a lipid in the sense strand is modified with a 2′-OMe. In some embodiments, the sugar moiety at each of nucleotides at positions 1-7 and 12-20 in the sense strand is modified with a 2′-OMe.

[0426] In some embodiments, a lipid-conjugated RNAi oligonucleotide provided herein comprises an antisense strand 22 nucleotides in length, with positions 1-22 numbered 5′ to 3′, and a sense strand having a 2′-fluoro modification at each of the nucleotides forming a base pair with nucleotides at one or more of positions 10, 11, 12, and 13 of the antisense strand. In some embodiments, a lipid-conjugated RNAi oligonucleotide provided herein comprises an antisense strand 22 nucleotides in length, with positions 1-22 numbered 5′ to 3′, and a sense strand having a 2′-fluoro modification at each of the nucleotides forming a base pair with nucleotides at positions 10, 11, 12, 13, or any combination thereof, of the antisense strand. In some embodiments, a lipid-conjugated RNAi oligonucleotide provided herein comprises an antisense strand 22 nucleotides in length, with positions 1-22 numbered 5′ to 3′, and a sense strand having a 2′-fluoro modification at each of the nucleotides forming a base pair with nucleotides at positions 10, 11, 12, and 13 of the antisense strand.

[0427] In some embodiments, the sense strand comprises at least one 2′-F modified nucleotide wherein the remaining nucleotides not modified with a 2′-F group or conjugated to a lipid are modified with a 2′-OMe.

[0428] In some embodiments, the antisense strand has 7 nucleotides that are modified at the 2′ position of the sugar moiety with a 2′-F. In some embodiments, the sugar moiety at positions 2, 3, 4, 5, 7, 10, and 14 of the antisense strand are modified with a 2′-F. In some embodiments, the antisense strand has 14 nucleotides that are modified at the 2′ position of the sugar moiety with a 2′-OMe. In some embodiments, the sugar moiety at positions 6, 8, 9, 11, 12, 13, 15, 16, 17, 18, 19, 20, 21, and 22 of the antisense strand are modified with a 2′-OMe.

[0429] In some embodiments, the sense strand has 4 nucleotides that are modified at the 2′ position of the sugar moiety with a 2′-F. In some embodiments, the sugar moiety at positions 2, 3, 8, 9, 10, and 11 of the sense strand are modified with a 2′-F. In some embodiments, the sense strand has 15 nucleotides that are modified at the 2′ position of the sugar moiety with a 2′-OMe. In some embodiments, the sugar moiety at positions 6, 8, 9, 11, 12, 13, 15, 16, 17, 18, 19, 20, 21, and 22 of the antisense strand are modified with a 2′-OMe.

[0430] In some embodiments, the sense strand comprises a 2′-fluoro modification at positions 3-6 or 4-7, numbered 5′ to 3′. In some embodiments, the sense strand comprises a 2′-fluoro modification at positions 3-6. In some embodiments, the sense strand comprises a 2′-fluoro modification at positions 4-7.

[0431] In some embodiments, the antisense strand has 3 nucleotides that are modified at the 2′-position of the sugar moiety with a 2′-F. In some embodiments, the sugar moiety at positions 2, 5 and 14 and optionally up to 3 of the nucleotides at positions 1, 3, 7 and 10 of the antisense strand are modified with a 2′-F. In some embodiments, the sugar moiety at each of the positions at positions 2, 5 and 14 of the antisense strand is modified with the 2′-F. In other embodiments, the sugar moiety at each of the positions at positions 1, 2, 5 and 14 of the antisense strand is modified with the 2′-F. In other embodiments, the sugar moiety at each of the positions at positions 2, 4, 5 and 14 of the antisense strand is modified with the 2′-F. In some embodiments, the sugar moiety at each of the positions at positions 1, 2, 3, 5, 7 and 14 of the antisense strand is modified with the 2′-F. In some embodiments, the sugar moiety at each of the positions at positions 2, 3, 4, 5, 7 and 14 of the antisense strand is modified with the 2′-F. In some embodiments, the sugar moiety at each of the positions at positions 1, 2, 3, 5, 10 and 14 of the antisense strand is modified with the 2′-F. In some embodiments, the sugar moiety at each of the positions at positions 2, 3, 4, 5, 10 and 14 of the antisense strand is modified with the 2′-F. In some embodiments, the sugar moiety at each of the positions at positions 2, 3, 5, 7, 10 and 14 of the antisense strand is modified with the 2′-F. In some embodiments, the sugar moiety at each of the positions at positions 2, 3, 4, 5, 7, 10 and 14 of the antisense strand is modified with the 2′-F. In some embodiments, the antisense strand has 9 nucleotides that are modified at the 2′-position of the sugar moiety with a 2′-F. In some embodiments, the sugar moiety at each of the positions at positions 2, 3, 4, 5, 7, 10, 14, 16 and 19 of the antisense strand is modified with the 2′-F.

[0432] In some embodiments, a lipid-conjugated RNAi oligonucleotide provided herein comprises an antisense strand having the sugar moiety of each of the nucleotides at positions 2, 5, and 14 of the antisense strand modified with 2′-F and the sugar moiety of each of the remaining nucleotides of the antisense strand modified with a modification selected from the group consisting of 2′-O-propargyl, 2′-O-propylamin, 2′-amino, 2′-ethyl, 2′-aminoethyl (EA), 2′-O-methyl (2′-OMe), 2′-O-methoxyethyl (2′-MOE), 2′-O-[2-(methylamino)-2-oxoethyl] (2′-O-NMA), and 2′-deoxy-2′-fluoro-β-d-arabinonucleic acid (2′-FANA).

[0433] In some embodiments, a lipid-conjugated RNAi oligonucleotide provided herein comprises an antisense strand having the sugar moiety of each of the nucleotides at positions 2, 3, 4, 5, 7, 10, 14, 16 and 19 of the antisense strand modified with 2′-F and the sugar moiety of each of the remaining nucleotides of the antisense strand modified with a modification selected from the group consisting of 2′-O-propargyl, 2′-O-propylamin, 2′-amino, 2′-ethyl, 2′-aminoethyl (EA), 2′-O-methyl (2′-OMe), 2′-O-methoxyethyl (2′-MOE), 2′-O-[2-(methylamino)-2-oxoethyl] (2′-O-NMA), and 2′-deoxy-2′-fluoro-β-d-arabinonucleic acid (2′-FANA).

[0434] In some embodiments, a lipid-conjugated RNAi oligonucleotide provided herein comprises an antisense strand having the sugar moiety of each of the nucleotides at positions 1, 2, 5, and 14 of the antisense strand modified with 2′-F and the sugar moiety of each of the remaining nucleotides of the antisense strand modified with a modification selected from the group consisting of 2′-O-propargyl, 2′-O-propylamin, 2′-amino, 2′-ethyl, 2′-aminoethyl (EA), 2′-O-methyl (2′-OMe), 2′-O-methoxyethyl (2′-MOE), 2′-O-[2-(methylamino)-2-oxoethyl] (2′-O-NMA), and 2′-deoxy-2′-fluoro-β-d-arabinonucleic acid (2′-FANA).

[0435] In some embodiments, a lipid-conjugated RNAi oligonucleotide provided herein comprises an antisense strand having the sugar moiety of each of the nucleotides at positions 1, 2, 3, 5, 7, and 14 of the antisense strand modified with 2′-F and the sugar moiety of each of the remaining nucleotides of the antisense strand modified with a modification selected from the group consisting of 2′-O-propargyl, 2′-O-propylamin, 2′-amino, 2′-ethyl, 2′-aminoethyl (EA), 2′-O-methyl (2′-OMe), 2′-O-methoxyethyl (2′-MOE), 2′-O-[2-(methylamino)-2-oxoethyl] (2′-O-NMA), and 2′-deoxy-2′-fluoro-β-d-arabinonucleic acid (2′-FANA).

[0436] In some embodiments, a lipid-conjugated RNAi oligonucleotide provided herein comprises an antisense strand having the sugar moiety of each of the nucleotides at positions 1, 2, 3, 5, 10, and 14 of the antisense strand modified with 2′-F and the sugar moiety of each of the remaining nucleotides of the antisense strand modified with a modification selected from the group consisting of 2′-O-propargyl, 2′-O-propylamin, 2′-amino, 2′-ethyl, 2′-aminoethyl (EA), 2′-O-methyl (2′-OMe), 2′-O-methoxyethyl (2′-MOE), 2′-O-[2-(methylamino)-2-oxoethyl] (2′-O-NMA), and 2′-deoxy-2′-fluoro-β-d-arabinonucleic acid (2′-FANA).

[0437] In some embodiments, a lipid-conjugated RNAi oligonucleotide provided herein comprises an antisense strand having the sugar moiety of each of the nucleotides at positions 2, 3, 5, 7, 10, and 14 of the antisense strand modified with 2′-F and the sugar moiety of each of the remaining nucleotides of the antisense strand modified with a modification selected from the group consisting of 2′-O-propargyl, 2′-O-propylamin, 2′-amino, 2′-ethyl, 2′-aminoethyl (EA), 2′-O-methyl (2′-OMe), 2′-O-methoxyethyl (2′-MOE), 2′-O-[2-(methylamino)-2-oxoethyl] (2′-O-NMA), and 2′-deoxy-2′-fluoro-β-d-arabinonucleic acid (2′-FANA).

[0438] In some embodiments, a lipid-conjugated RNAi oligonucleotide provided herein comprises an antisense strand having the sugar moiety of each of the nucleotides at positions 2, 3, 4, 5, 7, 10, 14, 16 and 19 of the antisense strand modified with 2′-F and the sugar moiety of each of the remaining nucleotides of the antisense strand modified with a modification selected from the group consisting of 2′-O-propargyl, 2′-O-propylamin, 2′-amino, 2′-ethyl, 2′-aminoethyl (EA), 2′-O-methyl (2′-OMe), 2′-O-methoxyethyl (2′-MOE), 2′-O-[2-(methylamino)-2-oxoethyl] (2′-O-NMA), and 2′-deoxy-2′-fluoro-β-d-arabinonucleic acid (2′-FANA).

[0439] In some embodiments, a lipid-conjugated RNAi oligonucleotide provided herein comprises an antisense strand having the sugar moiety of each of the nucleotides at positions 2, 3, 4, 5, 7, 10, and 14 of the antisense strand modified with 2′-F and the sugar moiety of each of the remaining nucleotides of the antisense strand modified with a modification selected from the group consisting of 2′-O-propargyl, 2′-O-propylamin, 2′-amino, 2′-ethyl, 2′-aminoethyl (EA), 2′-O-methyl (2′-OMe), 2′-O-methoxyethyl (2′-MOE), 2′-O-[2-(methylamino)-2-oxoethyl] (2′-O-NMA), and 2′-deoxy-2′-fluoro-β-d-arabinonucleic acid (2′-FANA).

[0440] In some embodiments, a lipid-conjugated RNAi oligonucleotide provided herein comprises an antisense strand having the sugar moiety at position 1, position 2, position 3, position 4, position 5, position 6, position 7, position 8, position 9, position 10, position 11, position 12, position 13, position 14, position 15, position 16, position 17, position 18, position 19, position 20, position 21, or position 22 modified with 2′-F.

[0441] In some embodiments, a lipid-conjugated RNAi oligonucleotide provided herein comprises an antisense strand having the sugar moiety at position 1, position 2, position 3, position 4, position 5, position 6, position 7, position 8, position 9, position 10, position 11, position 12, position 13, position 14, position 15, position 16, position 17, position 18, position 19, position 20, position 21, or position 22 modified with 2′-OMe.

[0442] In some embodiments, a lipid-conjugated RNAi oligonucleotide provided herein comprises an antisense strand having the sugar moiety at position 1, position 2, position 3, position 4, position 5, position 6, position 7, position 8, position 9, position 10, position 11, position 12, position 13, position 14, position 15, position 16, position 17, position 18, position 19, position 20, position 21, or position 22 modified with a modification selected from the group consisting of 2′-O-propargyl, 2′-O-propylamin, 2′-amino, 2′-ethyl, 2′-aminoethyl (EA), 2′-O-methyl (2′-OMe), 2′-O-methoxyethyl (2′-MOE), 2′-O-[2-(methylamino)-2-oxoethyl] (2′-O-NMA), and 2′-deoxy-2′-fluoro-β-d-arabinonucleic acid (2′-FANA).

[0443] In some embodiments, a lipid-conjugated RNAi oligonucleotide provided herein comprises a sense strand having the sugar moiety at positions 8-11 modified with 2′-F. In some embodiments, a lipid-conjugated RNAi oligonucleotide provided herein comprises a sense strand having the sugar moiety at positions 3, 5, 8, 10, 12, 13, 15 and 17 modified with 2′-F. In some embodiments, a lipid-conjugated RNAi oligonucleotide provided herein comprises a sense strand having the sugar moiety at positions 1-7 and 12-17 or 12-20 modified with 2′OMe. In some embodiments, a lipid-conjugated RNAi oligonucleotide provided herein comprises a sense strand having the sugar moiety at positions 2-7 and 12-17 or 12-20 modified with 2′OMe. In some embodiments, a lipid-conjugated RNAi oligonucleotide provided herein comprises a sense strand having the sugar moiety at positions 1-6 and 12-17 or 12-20 modified with 2′OMe. In some embodiments, a lipid-conjugated RNAi oligonucleotide provided herein comprises a sense strand having the sugar moiety at positions 1, 2, 4, 6, 7, 9, 11, 14, 16 and 18-20 modified with 2′OMe. In some embodiments, a lipid-conjugated RNAi oligonucleotide provided herein comprises a sense strand having the sugar moiety of each of the nucleotides at positions 1-7 and 12-17 or 12-20 of the sense strand modified with a modification selected from the group consisting of 2′-O-propargyl, 2′-O-propylamin, 2′-amino, 2′-ethyl, 2′-aminoethyl (EA), 2′-O-methyl (2′-OMe), 2′-O-methoxyethyl (2′-MOE), 2′-O-[2-(methylamino)-2-oxoethyl] (2′-O-NMA), and 2′-deoxy-2′-fluoro-β-d-arabinonucleic acid (2′-FANA). In some embodiments, a lipid-conjugated RNAi oligonucleotide provided herein comprises a sense strand having the sugar moiety of each of the nucleotides at positions 2-7 and 12-17 or 12-20 of the sense strand modified with a modification selected from the group consisting of 2′-O-propargyl, 2′-O-propylamin, 2′-amino, 2′-ethyl, 2′-aminoethyl (EA), 2′-O-methyl (2′-OMe), 2′-O-methoxyethyl (2′-MOE), 2′-O-[2-(methylamino)-2-oxoethyl] (2′-O-NMA), and 2′-deoxy-2′-fluoro-β-d-arabinonucleic acid (2′-FANA). In some embodiments, a lipid-conjugated RNAi oligonucleotide provided herein comprises a sense strand having the sugar moiety of each of the nucleotides at positions 1-6 and 12-17 or 12-20 of the sense strand modified with a modification selected from the group consisting of 2′-O-propargyl, 2′-O-propylamin, 2′-amino, 2′-ethyl, 2′-aminoethyl (EA), 2′-O-methyl (2′-OMe), 2′-O-methoxyethyl (2′-MOE), 2′-O-[2-(methylamino)-2-oxoethyl] (2′-O-NMA), and 2′-deoxy-2′-fluoro-β-d-arabinonucleic acid (2′-FANA). In some embodiments, a lipid-conjugated RNAi oligonucleotide provided herein comprises a sense strand having the sugar moiety at positions 1, 2, 4, 6, 7, 9, 11, 14, 16 and 18-20 of the sense strand modified with a modification selected from the group consisting of 2′-O-propargyl, 2′-O-propylamin, 2′-amino, 2′-ethyl, 2′-aminoethyl (EA), 2′-O-methyl (2′-OMe), 2′-O-methoxyethyl (2′-MOE), 2′-O-[2-(methylamino)-2-oxoethyl] (2′-O-NMA), and 2′-deoxy-2′-fluoro-β-d-arabinonucleic acid (2′-FANA).

[0444] In some embodiments, a lipid-conjugated RNAi oligonucleotide provided herein comprises a sense strand having the sugar moiety at position 1, position 2, position 3, position 4, position 5, position 6, position 7, position 8, position 9, position 10, position 11, position 12, position 13, position 14, position 15, position 16, position 17, position 18, position 19, position 20, position 21, position 22, position 23, position 24, position 25, position 26, position 27, position 28, position 29, position 30, position 31, position 32, position 33, position 34, position 35, or position 36 modified with 2′-F.

[0445] In some embodiments, a lipid-conjugated RNAi oligonucleotide provided herein comprises a sense strand having the sugar moiety at position 1, position 2, position 3, position 4, position 5, position 6, position 7, position 8, position 9, position 10, position 11, position 12, position 13, position 14, position 15, position 16, position 17, position 18, position 19, position 20, position 21, position 22, position 23, position 24, position 25, position 26, position 27, position 28, position 29, position 30, position 31, position 32, position 33, position 34, position 35, position 36, position 37 or position 38 modified with 2′-F.

[0446] In some embodiments, a lipid-conjugated RNAi oligonucleotide provided herein comprises a sense strand having the sugar moiety at position 1, position 2, position 3, position 4, position 5, position 6, position 7, position 8, position 9, position 10, position 11, position 12, position 13, position 14, position 15, position 16, position 17, position 18, position 19, position 20, position 21, position 22, position 23, position 24, position 25, position 26, position 27, position 28, position 29, position 30, position 31, position 32, position 33, position 34, position 35, or position 36 modified with 2′-OMe.

[0447] In some embodiments, a lipid-conjugated RNAi oligonucleotide provided herein comprises a sense strand having the sugar moiety at position 1, position 2, position 3, position 4, position 5, position 6, position 7, position 8, position 9, position 10, position 11, position 12, position 13, position 14, position 15, position 16, position 17, position 18, position 19, position 20, position 21, position 22, position 23, position 24, position 25, position 26, position 27, position 28, position 29, position 30, position 31, position 32, position 33, position 34, position 35, position 36, position 37 or position 38 modified with 2′-OMe.

[0448] In some embodiments, a lipid-conjugated RNAi oligonucleotide provided herein comprises a sense strand having the sugar moiety at position 1, position 2, position 3, position 4, position 5, position 6, position 7, position 8, position 9, position 10, position 11, position 12, position 13, position 14, position 15, position 16, position 17, position 18, position 19, position 20, position 21, position 22, position 23, position 24, position 25, position 26, position 27, position 28, position 29, position 30, position 31, position 32, position 33, position 34, position 35, or position 36 modified with a modification selected from the group consisting of 2′-O-propargyl, 2′-O-propylamin, 2′-amino, 2′-ethyl, 2′-aminoethyl (EA), 2′-O-methyl (2′-OMe), 2′-O-methoxyethyl (2′-MOE), 2′-O-[2-(methylamino)-2-oxoethyl] (2′-O-NMA), and 2′-deoxy-2′-fluoro-β-d-arabinonucleic acid (2′-FANA).

[0449] In some embodiments, a lipid-conjugated RNAi oligonucleotide provided herein comprises a sense strand having the sugar moiety at position 1, position 2, position 3, position 4, position 5, position 6, position 7, position 8, position 9, position 10, position 11, position 12, position 13, position 14, position 15, position 16, position 17, position 18, position 19, position 20, position 21, position 22, position 23, position 24, position 25, position 26, position 27, position 28, position 29, position 30, position 31, position 32, position 33, position 34, position 35, position 36, position 37 or position 38 modified with a modification selected from the group consisting of 2′-O-propargyl, 2′-O-propylamin, 2′-amino, 2′-ethyl, 2′-aminoethyl (EA), 2′-O-methyl (2′-OMe), 2′-O-methoxyethyl (2′-MOE), 2′-O-[2-(methylamino)-2-oxoethyl] (2′-O-NMA), and 2′-deoxy-2′-fluoro-β-d-arabinonucleic acid (2′-FANA).

### 5′-Terminal Phosphate

[0450] In some embodiments, a lipid-conjugated RNAi oligonucleotide described herein comprises a 5′-terminal phosphate. In some embodiments, the 5′-terminal phosphate groups of the lipid-conjugated RNAi oligonucleotide enhance the interaction with Ago2. However, oligonucleotides comprising a 5′-phosphate group may be susceptible to degradation via phosphatases or other enzymes, which can limit their bioavailability in vivo. In some embodiments, a lipid-conjugated RNAi oligonucleotide herein comprises analogs of 5′ phosphates that are resistant to such degradation. In some embodiments, the phosphate analog is oxymethyl phosphonate, vinyl phosphonate or malonyl phosphonate, or a combination thereof. In some embodiments, the 5′ end of a lipid-conjugated RNAi oligonucleotide strand is attached to chemical moiety that mimics the electrostatic and steric properties of a natural 5′-phosphate group (“phosphate mimic”).

[0451] In some embodiments, a lipid-conjugated RNAi oligonucleotide herein has a phosphate analog at a 4′-carbon position of the sugar (referred to as a “4′-phosphate analog”). See, e.g., Intl. Patent Application Publication No. WO 2018/045317. In some embodiments, a lipid-conjugated RNAi oligonucleotide herein comprises a 4′-phosphate analog at a 5′-terminal nucleotide. In some embodiments, a phosphate analog is an oxymethyl phosphonate, in which the oxygen atom of the oxymethyl group is bound to the sugar moiety (e.g., at its 4′-carbon) or analog thereof. In other embodiments, a 4′-phosphate analog is a thiomethyl phosphonate or an aminomethyl phosphonate, in which the sulfur atom of the thiomethyl group or the nitrogen atom of the amino methyl group is bound to the 4′-carbon of the sugar moiety or analog thereof. In some embodiments, a 4′-phosphate analog is an oxymethyl phosphonate. In some embodiments, an oxymethyl phosphonate is represented by the formula —O—CH₂—PO(OH)₂, —O—CH₂—PO(OR)₂, or —O—CH₂—POOH(R), in which R is independently selected from H, CH₃, an alkyl group, CH₂CH₂CN, CH₂OCOC(CH₃)₃, CH₂OCH₂CH₂Si(CH₃)₃ or a protecting group. In some embodiments, the alkyl group is CH₂CH₃. More typically, R is independently selected from H, CH₃ or CH₂CH₃. In some embodiment, R is CH₃. In some embodiments, the 4′-phosphate analog is 5′-methoxyphosphonate-4′-oxy. In some embodiments, the 4′-phosphate analog is 4′-oxymethyl phosphonate.

[0452] In some embodiments, a lipid-conjugated RNAi oligonucleotide provided herein comprises an antisense strand comprising a 4′-phosphate analog at the 5′-terminal nucleotide, wherein 5′-terminal nucleotide comprises the following structure:

[chemical structure]

[0453] 4′-O-monomethylphosphonate-2′-O-methyluridine phosphorothioate [MePhosphonate-4O-mUs, alternatively referred to as “MeMOP”]

### Modified Internucleotide Linkage

[0454] In some embodiments, a lipid-conjugated RNAi oligonucleotide herein comprises a modified internucleoside linkage. In some embodiments, phosphate modifications or substitutions result in an oligonucleotide that comprises at least about 1 (e.g., at least 1, at least 2, at least 3 or at least 5) modified internucleotide linkage. In some embodiments, any one of the oligonucleotides disclosed herein comprises about 1 to about 10 (e.g., 1 to 10, 2 to 8, 4 to 6, 3 to 10, 5 to 10, 1 to 5, 1 to 3 or 1 to 2) modified internucleotide linkages. In some embodiments, any one of the oligonucleotides disclosed herein comprises 1, 2, 3, 4, 5, 6, 7, 8, 9 or 10 modified internucleotide linkages.

[0455] A modified internucleotide linkage may be a phosphorodithioate linkage, a phosphorothioate linkage, a phosphotriester linkage, a thionoalkylphosphonate linkage, a thionalkylphosphotriester linkage, a phosphoramidite linkage, a phosphonate linkage or a boranophosphate linkage. In some embodiments, at least one modified internucleotide linkage of any one of the oligonucleotides as disclosed herein is a phosphorothioate linkage.

[0456] In some embodiments, a lipid-conjugated RNAi oligonucleotide provided herein has a phosphorothioate linkage between one or more of positions 1 and 2 of the sense strand, positions 1 and 2 of the antisense strand, positions 2 and 3 of the antisense strand, positions 3 and 4 of the antisense strand, positions 20 and 21 of the antisense strand, and positions 21 and 22 of the antisense strand. In some embodiments, the oligonucleotide described herein has a phosphorothioate linkage between each of positions 1 and 2 of the sense strand, positions 1 and 2 of the antisense strand, positions 2 and 3 of the antisense strand, positions 20 and 21 of the antisense strand, and positions 21 and 22 of the antisense strand. In some embodiments, the oligonucleotide described herein has a phosphorothioate linkage between each of positions 1 and 2 of the sense strand, positions 1 and 2 of the antisense strand, positions 2 and 3 of the antisense strand, positions 3 and 4 of the antisense strand, positions 20 and 21 of the antisense strand, and positions 21 and 22 of the antisense strand. In some embodiments, the oligonucleotide described herein has a phosphorothioate linkage between each of positions 1 and 2 of the sense strand, positions 18 and 19 of the sense strand, positions 19 and 20 of the sense strand, positions 1 and 2 of the antisense strand, positions 2 and 3 of the antisense strand, positions 3 and 4 of the antisense strand, positions 20 and 21 of the antisense strand, and positions 21 and 22 of the antisense strand.

[0457] In some embodiments, the oligonucleotide described herein has a phosphorothioate linkage between each of positions 1 and 2 of the sense strand, the third to last position and penultimate position of the sense strand, and the penultimate position and ultimate position of the sense strand.

[0458] In some embodiments, the oligonucleotide described herein has a phosphorothioate linkage between positions 1 and 2 of the sense strand, positions 1 and 2 of the antisense strand, positions 2 and 3 of the antisense strand, positions 3 and 4 of the antisense strand, positions 13 and 14 of the antisense strand, positions 14 and 15 of the antisense strand, positions 20 and 21 of the antisense strand, and positions 21 and 22 of the antisense strand.

[0459] In some embodiments, the oligonucleotide described herein has a phosphorothioate linkage between positions 1 and 2 of the sense strand, positions 1 and 2 of the antisense strand, positions 2 and 3 of the antisense strand, positions 3 and 4 of the antisense strand, positions 16 and 17 of the antisense strand, positions 17 and 18 of the antisense strand, positions 18 and 19 of the antisense strand, positions 19 and 20 of the antisense strand, positions 20 and 21 of the antisense strand, and positions 21 and 22 of the antisense strand.

[0460] In some embodiments, the oligonucleotide described herein has a phosphorothioate linkage between positions 1 and 2 of the sense strand, positions 1 and 2 of the antisense strand, positions 2 and 3 of the antisense strand, positions 3 and 4 of the antisense strand, positions 13 and 14 of the antisense strand, positions 14 and 15 of the antisense strand, positions 16 and 17 of the antisense strand, positions 17 and 18 of the antisense strand, positions 18 and 19 of the antisense strand, positions 19 and 20 of the antisense strand, positions 20 and 21 of the antisense strand, and positions 21 and 22 of the antisense strand.

[0461] In some embodiments, the oligonucleotide comprises phosphorothioate linkages on the sense strand between nucleotides at positions 1 and 2, 8 and 9, and 9 and 10. In some embodiments, the oligonucleotide comprises phosphorothioate linkages on the antisense strand between nucleotides at positions 1 and 2, 2 and 3, 3 and 4, 12 and 14, 14 and 15, 20 and 21, and 21 and 22.

[0462] In some embodiments, the oligonucleotide described herein has a phosphorothioate linkage between positions 1 and 2 of the sense strand, positions 1 and 2 of the antisense strand, positions 2 and 3 of the antisense strand, positions 3 and 4 of the antisense strand, positions 12 and 13 of the antisense strand, positions 13 and 14 of the antisense strand, positions 14 and 15 of the antisense strand, positions 15 and 16 of the antisense strand. positions 16 and 17 of the antisense strand, positions 17 and 18 of the antisense strand, positions 18 and 19 of the antisense strand, positions 19 and 20 of the antisense strand, positions 20 and 21 of the antisense strand, and positions 21 and 22 of the antisense strand. In some embodiments, the oligonucleotide comprises a nucleotide at position 14 of a 22 nucleotide antisense strand, wherein the nucleotide is flanked by phosphorothioate linkages (i.e. a phosphorothioate linkage between positions 13 and 14 and between positions 14 and 15). In some embodiments, the flanked nucleotide at position 14 is the ultimate nucleotide of a duplex between the antisense strand and sense strand. In some embodiments, the oligonucleotide comprises a sense and antisense strand, wherein the antisense strand comprises a flanked oligonucleotide at position 14 of a 22 nucleotide antisense strand (i.e. a phosphorothioate linkage between positions 13 and 14 and between positions 14 and 15), wherein the sense and antisense strand form a duplex and the antisense strand comprises an overhang, and wherein the nucleotide at position 14 is within the overhang.

[0463] In some embodiments, an oligonucleotide conjugate described herein comprises a peptide nucleic acid (PNA). PNAs are oligonucleotide mimics in which the sugar-phosphate backbone has been replaced by a pseudopeptide skeleton, composed of N-(2-aminoethyl)glycine units. Nucleobases are linked to this skeleton through a two-atom carboxymethyl spacer. In some embodiments, an oligonucleotide conjugate described herein comprises a morpholino oligomer (PMO) comprising an internucleotide linkage backbone of methylene morpholine rings linked through phosphorodiamidate groups.

### Base Modifications

[0464] In some embodiments, a lipid-conjugated RNAi oligonucleotide herein comprises one or more modified nucleobases. In some embodiments, modified nucleobases (also referred to herein as base analogs) are linked at the 1′ position of a nucleotide sugar moiety. In some embodiments, a modified nucleobase is a nitrogenous base. In some embodiments, a modified nucleobase does not contain nitrogen atom. See, e.g., US Patent Application Publication No. 2008/0274462. In some embodiments, a modified nucleotide comprises a universal base. In some embodiments, a modified nucleotide does not contain a nucleobase (abasic).

[0465] In some embodiments, a universal base is a heterocyclic moiety located at the 1′ position of a nucleotide sugar moiety in a modified nucleotide, or the equivalent position in a nucleotide sugar moiety substitution, that, when present in a duplex, can be positioned opposite more than one type of base without substantially altering structure of the duplex. In some embodiments, compared to a reference single-stranded nucleic acid (e.g., oligonucleotide) that is fully complementary to a target nucleic acid, a single-stranded nucleic acid containing a universal base forms a duplex with the target nucleic acid that has a lower Tm than a duplex formed with the complementary nucleic acid. In some embodiments, when compared to a reference single-stranded nucleic acid in which the universal base has been replaced with a base to generate a single mismatch, the single-stranded nucleic acid containing the universal base forms a duplex with the target nucleic acid that has a higher Tm than a duplex formed with the nucleic acid comprising the mismatched base.

[0466] Non-limiting examples of universal-binding nucleotides include, but are not limited to, inosine, 1-β-D-ribofuranosyl-5-nitroindole and/or 1-β-D-ribofuranosyl-3-nitropyrrole (see, US Patent Application Publication No. 2007/0254362; Van Aerschot et al. (1995) NUCLEIC ACIDS RES. 23:4363-70; Loakes et al. (1995) NUCLEIC ACIDS RES. 23:2361-66; and Loakes & Brown (1994) NUCLEIC ACIDS RES. 22:4039-43).

### Tm-Increasing Nucleotides

[0467] In some embodiments, the oligonucleotide described herein comprises at least one Tm-increasing nucleotide in the sense strand. In some embodiments, the oligonucleotide has one Tm-increasing nucleotide in the sense strand. In some embodiments, the oligonucleotide has up to two Tm-increasing nucleotides in the sense strand. In some embodiments, the oligonucleotide has up to three Tm-increasing nucleotides in the sense strand. In some embodiments, the oligonucleotide has up to four Tm-increasing nucleotides in the sense strand. In some embodiments, the oligonucleotide has up to five Tm-increasing nucleotides in the sense strand. In some embodiments, the oligonucleotide has up to six Tm-increasing nucleotides in the sense strand. In some embodiments, the oligonucleotide has up to seven Tm-increasing nucleotides in the sense strand. In some embodiments, the oligonucleotide has up to eight Tm-increasing nucleotides in the sense strand. In some embodiments, the oligonucleotide has up to nine Tm-increasing nucleotides in the sense strand. In some embodiments, the oligonucleotide has up to ten Tm-increasing nucleotides in the sense strand.

[0468] In some embodiments, the oligonucleotide has 1 to 2 Tm-increasing nucleotides in the sense strand. In some embodiments, the oligonucleotide has 1 to 3 Tm-increasing nucleotides in the sense strand. In some embodiments, the oligonucleotide has 1 to 4 Tm-increasing nucleotides in the sense strand. In some embodiments, the oligonucleotide has 1 to 5 Tm-increasing nucleotides in the sense strand.

[0469] In some embodiments, an oligonucleotide comprising a stem-loop comprises a Tm-increasing nucleotide in the stem. In some embodiments, an oligonucleotide comprising a stem-loop comprises Tm-increasing nucleotides in at least one base pair of the stem. In some embodiments, an oligonucleotide comprising a stem-loop comprises Tm-increasing nucleotides in one base pair of the stem. In some embodiments, an oligonucleotide comprising a stem-loop comprises Tm-increasing nucleotides in two base pairs of the stem. In some embodiments, an oligonucleotide comprising a stem-loop comprises Tm-increasing nucleotides in three base pairs of the stem. In some embodiments, an oligonucleotide comprising a stem-loop comprises Tm-increasing nucleotides in four base pairs of the stem. In some embodiments, an oligonucleotide comprising a stem-loop comprises Tm-increasing nucleotides in five base pairs of the stem. In some embodiments, an oligonucleotide comprising a stem-loop comprises Tm-increasing nucleotides in six base pairs of the stem.

[0470] Tₘ-increasing nucleotides include, but are not limited to, bicyclic nucleotides, tricyclic nucleotides, a G-clamp, and analogues thereof, hexitol nucleotides, or a modified nucleotide. In some embodiments, the Tm-increasing nucleotide is a bicyclic nucleotide. In some embodiments, the Tm-increasing nucleotide is a locked nucleic acid (LNA).

[0471] In some embodiments, the sense strand of the oligonucleotide comprises a Tm-increasing nucleotide at one or more of positions 2, 7, 8, 9, 10, 11, 12, 14, 15, 16, 18, and 19. In some embodiments, the sense strand of the oligonucleotide comprises a Tm-increasing nucleotide at position 2. In some embodiments, the sense strand of the oligonucleotide comprises a Tm-increasing nucleotide at position 9. In some embodiments, the sense strand of the oligonucleotide comprises a Tm-increasing nucleotide at position 10. In some embodiments, the sense strand of the oligonucleotide comprises a Tm-increasing nucleotide at position 11. In some embodiments, the sense strand of the oligonucleotide comprises a Tm-increasing nucleotide at position 12. In some embodiments, the sense strand of the oligonucleotide comprises a Tm-increasing nucleotide at position 14. In some embodiments, the sense strand of the oligonucleotide comprises a Tm-increasing nucleotide at position 15. In some embodiments, the sense strand of the oligonucleotide comprises a Tm-increasing nucleotide at position 16. In some embodiments, the sense strand of the oligonucleotide comprises a Tm-increasing nucleotide at position 18. In some embodiments, the sense strand of the oligonucleotide comprises a Tm-increasing nucleotide at position 19.

[0472] In some embodiments, a 10-nucleotide sense strand, with nucleotides numbered 5′ to 3′, comprises a Tm-increasing nucleotide at one or more of positions 2, 6 and 7. In some embodiments, a 10-nucleotide sense strand, with nucleotides numbered 5′ to 3′, comprises a Tm-increasing nucleotide at positions 2. In some embodiments, a 10-nucleotide sense strand, with nucleotides numbered 5′ to 3′, comprises a Tm-increasing nucleotide at positions 2 and 6. In some embodiments, a 10-nucleotide sense strand, with nucleotides numbered 5′ to 3′, comprises a Tm-increasing nucleotide at positions 2 and 7. In some embodiments, a 10-nucleotide sense strand, with nucleotides numbered 5′ to 3′, comprises a Tm-increasing nucleotide at 6 and 7. In some embodiments, a 10-nucleotide sense strand, with nucleotides numbered 5′ to 3′, comprises a Tm-increasing nucleotide at positions 2, 6 and 7.

[0473] In some embodiments, a 12-nucleotide sense strand, with nucleotides numbered 5′ to 3′, comprises a Tm-increasing nucleotide at one or more of positions 2, 7, 8, 10, and 11. In some embodiments, a 12-nucleotide sense strand, with nucleotides numbered 5′ to 3′, comprises a Tm-increasing nucleotide at position 2. In some embodiments, a 12-nucleotide sense strand, with nucleotides numbered 5′ to 3′, comprises a Tm-increasing nucleotide at position 2 and position 7. In some embodiments, a 12-nucleotide sense strand, with nucleotides numbered 5′ to 3′, comprises a Tm-increasing nucleotide at position 2, position 7, and position 8. In some embodiments, a 12-nucleotide sense strand, with nucleotides numbered 5′ to 3′, comprises a Tm-increasing nucleotide at position 2, position 7, position 8, and position 10. In some embodiments, a 12-nucleotide sense strand, with nucleotides numbered 5′ to 3′, comprises a Tm-increasing nucleotide at position 2, position 7, position 8, position 10, and position 11. In some embodiments, a 12-nucleotide sense strand, with nucleotides numbered 5′ to 3′, comprises a Tm-increasing nucleotide at position 2, position 10, and position 11. In some embodiments, the sense strand comprises a Tm-increasing nucleotide at position 2, position 11, and position 12.

[0474] In some embodiments, a 14-nucleotide sense strand, with nucleotides numbered 5′ to 3′, comprises a Tm-increasing nucleotide at one or more of positions 2, 9, 10, 12, and 13. In some embodiments, a 14-nucleotide sense strand, with nucleotides numbered 5′ to 3′, comprises a Tm-increasing nucleotide at position 2. In some embodiments, a 14-nucleotide sense strand, with nucleotides numbered 5′ to 3′, comprises a Tm-increasing nucleotide at position 2 and position 9. In some embodiments, a 14-nucleotide sense strand, with nucleotides numbered 5′ to 3′, comprises a Tm-increasing nucleotide at position 2, position 9, and position 10. In some embodiments, a 14-nucleotide sense strand, with nucleotides numbered 5′ to 3′, comprises a Tm-increasing nucleotide at position 2, position 9, position 10, position 12, and position 13.

[0475] In some embodiments, a 16-nucleotide sense strand, with nucleotides numbered 5′ to 3′, comprises a Tm-increasing nucleotide at one or more of positions 2, 11, 12, 14, and 15. In some embodiments, a 16-nucleotide sense strand, with nucleotides numbered 5′ to 3′, comprises a Tm-increasing nucleotide at position 2. In some embodiments, a 16-nucleotide sense strand, with nucleotides numbered 5′ to 3′, comprises a Tm-increasing nucleotide at position 2 and position 11. In some embodiments, a 16-nucleotide sense strand, with nucleotides numbered 5′ to 3′, comprises a Tm-increasing nucleotide at position 2, position 11, and position 12. In some embodiments, a 16-nucleotide sense strand, with nucleotides numbered 5′ to 3′, comprises a Tm-increasing nucleotide at position 2, position 11, position 12, and position 14. In some embodiments, a 16-nucleotide sense strand, with nucleotides numbered 5′ to 3′, comprises a Tm-increasing nucleotide at position 2, position 11, position 12, position 14, and position 15.

[0476] In some embodiments, a 20-nucleotide sense strand, with nucleotides numbered 5′ to 3′, comprises a Tm-increasing nucleotide at one or more of positions 2, 15, 16, 18, and 19. In some embodiments, a 20-nucleotide sense strand, with nucleotides numbered 5′ to 3′, comprises a Tm-increasing nucleotide at position 2. In some embodiments, a 20-nucleotide sense strand, with nucleotides numbered 5′ to 3′, comprises a Tm-increasing nucleotide at position 2 and position 15. In some embodiments, a 20-nucleotide sense strand, with nucleotides numbered 5′ to 3′, comprises a Tm-increasing nucleotide at position 2, position 15, and position 16. In some embodiments, a 20-nucleotide sense strand, with nucleotides numbered 5′ to 3′, comprises a Tm-increasing nucleotide at position 2, position 15, position 16, and position 18. In some embodiments, a 20-nucleotide sense strand, with nucleotides numbered 5′ to 3′, comprises a Tm-increasing nucleotide at position 2, position 15, position 16, position 18, and position 19.

[0477] In some embodiments, the disclosure provides an RNAi oligonucleotide for reducing target gene expression by the RNAi pathway comprising a combination of one or more Tm-increasing nucleotides and one or more nucleotides (e.g., a modified nucleotide) having a lower binding affinity, wherein the duplex region comprising the RNAi oligonucleotide is maintained under physiological conditions and the ability of the RNAi oligonucleotide to inhibit or reduce target gene expression is maintained.

### Bicyclic Nucleotides

[0478] Bicyclic nucleotides typically have a sugar moiety with a 4 to 7 membered ring (including but not limited to a furanosyl) comprising a bridge connecting two atoms of the 4 to 7 membered ring to form a second ring, resulting in a bicyclic structure. Such bicyclic nucleotides have various names including BNA's and LNA's for bicyclic nucleic acids and locked nucleic acids, respectively. The synthesis of bicyclic nucleotides and their incorporation into nucleic acid compounds has also been reported in the literature, including, for example, Singh et al., Chem. Commun., 1998, 4, 455-56; Koshkin et al., TETRAHEDRON, 1998, 54, 3607-30; Wahlestedt et al., PROC. NATL. ACAD. SCI. U.S.A., 2000, 97, 5633-38; Kumar et al., BIOORG. MED. CHEM. LETT., 1998, 8, 2219-22; Singh et al., J. ORG. CHEM., 1998, 63, 10035-039; U.S. Pat. Nos. 7,427,672, 7,053,207, 6,794,499, 6,770,748, 6,268,490 and 6,794,499; and published U.S. applications 20040219565, 20040014959, 20030207841, 20040192918, 20030224377, 20040143114 and 20030082807; each of which is incorporated by reference herein, in its entirety.

[0479] In some embodiments, the Tₘ-increasing nucleotide is a bicyclic nucleotide that comprises a bicyclic sugar moiety. In certain embodiments, the bicyclic sugar moiety comprises a first ring of 4 to 7 members and a bridge forming a North-type sugar confirmation that connects any two atoms of the first ring of the sugar moiety to form a second ring. In certain embodiments, the bridge connects the 2′-carbon and the 4′-carbon of the first ring to form a second ring.

[0480] Typically, the bridge contains 2 to 8 atoms. In certain embodiments, the bridge contains 3 atoms. In certain embodiments, the bridge contains 4 atoms. In certain embodiments, the bridge contains 5 atoms. In certain embodiments, the bridge contains 6 atoms. In certain embodiments, the bridge contains 7 atoms. In certain embodiments, the bridge contains 8 atoms. In certain embodiments, the bridge contains more than 8 atoms.

[0481] In certain embodiments, the bicyclic sugar moiety is a substituted furanosyl comprising a bridge that connects the 2′-carbon and the 4′-carbon of the furanosyl to form the second ring. In certain embodiments, the bicyclic nucleotide has the structure of Formula I:

[chemical structure]

[0482] wherein B is a nucleobase;
[0483] wherein G is H, OH, NH₂, C₁-C₆ alkyl, C₂-C₆ alkenyl, C₂-C₆ alkynyl, substituted C₁-C₆ alkyl, substituted C₂-C₆ alkenyl, substituted C₂-C₆ alkynyl, acyl, substituted acyl, substituted amide, thiol, or substituted thio;
[0484] wherein X is O, S, or NR₁, wherein R₁ is H, C₁-C₆ alkyl, C₁-C₆ alkoxy, benzene or pyrene; and
[0485] wherein Wₐ and W_{b} are each independently, H, OH, a hydroxyl protecting group, a phosphorous moiety, or an internucleotide linking group attaching the nucleotide represented by Formula I to another nucleotide or to an oligonucleotide and wherein at least one of Wₐᵣ or W_{b} is an internucleotide linking group attaching the nucleotide represented by Formula I to an oligonucleotide.

[0486] In certain embodiments of Formula I, G is H and X is NR₁, wherein R₁ is benzene or pyrene. In certain embodiments, of Formula I, G is H and X is S.

[0487] In certain embodiments of Formula I, G is H and X is O:

[chemical structure]

[0488] In certain embodiments of Formula I, G is H and X is NR₁, wherein R₁ is H, CH₃, or OCH₃:

[chemical structure]

[0489] In certain embodiments of Formula I, G is OH or NH₂ and X is O.

[0490] In certain embodiments of Formula I, G is OH and X is O:

[chemical structure]

[0491] In certain embodiments of Formula I, G is NH₂ and X is O:

[chemical structure]

[0492] In certain embodiments, of Formula I, G is CH₃ or CH₂OCH₃ and X is O. In certain embodiments, of Formula I, G is CH₃ and X is O:

[chemical structure]

[0493] In certain embodiments, of Formula I, G is CH₂OCH₃ and X is O:

[chemical structure]

[0494] In certain embodiments, the bicyclic nucleotide has the structure of Formula II:

[chemical structure]

[0495] wherein B is a nucleobase;
   [0496] wherein Q₁ is CH₂ or O;
   [0497] wherein X is CH₂, O, S, or NR₁, wherein R₁ is H, C₁-C₆ alkyl, C₁-C₆ alkoxy, benzene or pyrene;
   [0498] wherein if Q₁ is O, X is CH₂;
   [0499] wherein if Q₁ is CH₂, X is CH₂, O, S, or NR₁, wherein R₁ is H, C₁-C₆ alkyl, C₁-C₆ alkoxy, benzene or pyrene;
   [0500] wherein Wₐ and W_{b} are each independently, H, OH, a hydroxyl protecting group, a phosphorous moiety, or an internucleotide linking group attaching the nucleotide represented by Formula II to another nucleotide or to an oligonucleotide and wherein at least one of Wₐ or W_{b} is an internucleotide linking group attaching the nucleotide represented by Formula II to an oligonucleotide.

[0501] In certain embodiments of Formula II, Q₁ is O and X is CH₂:

[chemical structure]

[0502] In certain embodiments of Formula II, Q₁ is CH₂ and X is O:

[chemical structure]

[0503] In certain embodiments of Formula II, Q₁ is CH₂ and X is NR₁, wherein R₁ is H, CH₃ or OCH₃:

[chemical structure]

[0504] In certain embodiments of Formula II, Q₁ is CH₂ and X is NH:

[chemical structure]

[0505] In certain embodiments, the bicyclic nucleotide has the structure of Formula II:

[chemical structure]

[0506] wherein B is a nucleobase;
[0507] wherein Q₂ is O or NR₁, wherein R₁ is H, C₁-C₆ alkyl, C₁-C₆ alkoxy, benzene or pyrene;
[0508] wherein X is CH₂, O, S, or NR₁, wherein R₁ is H, C₁-C₆ alkyl, C₁-C₆ alkoxy, benzene or pyrene;
[0509] wherein if Q₂ is O, X is NR₁;
[0510] wherein if Q₂ is NR₁, X is O or S;
[0511] wherein Wₐ and W_{b} are each independently, H, OH, a hydroxyl protecting group, a phosphorous moiety, or an internucleotide linking group attaching the nucleotide represented by Formula III to another nucleotide or to an oligonucleotide and wherein at least one of Wₐ or W_{b} is an internucleotide linking group attaching the nucleotide represented by Formula III to an oligonucleotide.

[0512] In certain embodiments of Formula III, Q₂ is O and X is NR₁. In certain embodiments of Formula III, Q₂ is O and X is NR₁, wherein R₁ is C₁-C₆ alkyl. In certain embodiments of Formula III, Q₂ is O and X is NR₁ and R₁ is H or CH₃.

[0513] In certain embodiments of Formula III, Q₂ is O and X is NR₁ and R₁ is CH₃:

[chemical structure]

[0514] In certain embodiments of Formula III, Q₂ is NR₁ and X is O. In certain embodiments of Formula III, Q₂ is NR₁, wherein R₁ is C₁-C₆ alkyl and X is O.

[0515] In certain embodiments of Formula III, Q₂ is NCH₃ and X is O:

[chemical structure]

[0516] In certain embodiments, the bicyclic nucleotide has the structure of Formula IV:

[chemical structure]

[0517] wherein B is a nucleobase;
[0518] wherein P₁ and P₃ are CH₂, P₂ is CH₂ or O and P₄ is O; and
[0519] wherein Wₐ and W_{b} are each independently, H, OH, a hydroxyl protecting group, a phosphorous moiety, or an internucleotide linking group attaching the nucleotide represented by Formula IV to another nucleotide or to an oligonucleotide and wherein at least one of Wₐ or W_{b} is an internucleotide linking group attaching the nucleotide represented by Formula IV to an oligonucleotide.

[0520] In certain embodiments of Formula IV, P₁, P₂, and P₃ are CH₂, and P₄ is O:

[chemical structure]

[0521] In certain embodiments of Formula IV, P₁ and P₃ are CH₂, P₂ is O and P₄ is O:

[chemical structure]

[0522] In certain embodiments, the bicyclic nucleotide has the structure of Formula Va or Vb:

[chemical structure]

[0523] wherein B is a nucleobase;
[0524] wherein r1, r2, r3, and r4 are each independently H, halogen, C₁-C₁₂ alkyl, substituted C₁-C₁₂ alkyl, C₂-C₁₂ alkenyl, substituted C₂-C₁₂ alkenyl, C₂-C₁₂ alkynyl; substituted C₂-C₁₂ alkynyl; C₁-C₁₂ alkoxy; substituted C₁-C₁₂ alkoxy, OT₁, ST₁, SOT₁, SO₂T₁, NT₁T₂, N3, CN, C(═O)OT₁, C(═O)NT₁T₂, C(═O) T₁, O—C(═O)NT₁T2, N(H)C(═NH)NT₁T₂, N(H)C(═O)NT₁T₂ or N(H)C(═S)NT₁T₂, wherein each of T1 and T2 is independently H, C₁-C₆ alkyl, or substituted C₁-C₁₆ alkyl; or
[0525] r1 and r2 or r3 and r4 together are ═C(r5)(r6), wherein r5 and r6 are each independently H, halogen, C₁-C₁₂ alkyl, or substituted C₁-C₁₂ alkyl; and
[0526] wherein Wₐ and W_{b} are each independently, H, OH, a hydroxyl protecting group, a phosphorous moiety, or an internucleotide linking group attaching the nucleotide represented by Formula V to another nucleotide or to an oligonucleotide and wherein at least one of Wₐ or W_{b} is an internucleotide linking group attaching the nucleotide represented by Formula V to an oligonucleotide.

[0527] In certain embodiments, the bicyclic sugar moiety is a substituted furanosyl comprising a bridge that connects the 2′-carbon and the 4′-carbon of the furanosyl to form the second ring, wherein the bridge that connects the 2′-carbon and the 4′-carbon of the furanosyl includes, but is not limited to:
[0528] a) 4′-CH₂—O—N(R)-2′ and 4′-CH₂—N(R)—O-2′, wherein R is H, C₁-C₁₂ alkyl, or a protecting group, including, for example, 4′-CH₂—NH—O-2′ (also known as BNA^{NC}), 4′-CH₂—N(CH₃)—O-2′ (also known as BNA^{NC}[NMe]), (as described in U.S. Pat. No. 7,427,672, which is hereby incorporated by reference in its entirety);
[0529] b) 4′-CH₂-2′; 4′-(CH₂)₂-2′; 4′-(CH₂)₃-2′; 4′-(CH₂)—O-2′ (also known as LNA); 4′-(CH₂)—S-2′; 4′-(CH₂)₂—O-2′ (also known as ENA); 4′-CH(CH₃)—O-2′ (also known as cEt); and 4′-CH(CH₂OCH₃)—O-2′ (also known as cMOE), and analogs thereof (as described in U.S. Pat. No. 7,399,845, which is hereby incorporated by reference in its entirety);
[0530] c) 4′-C(CH₃)(CH₃)—O-2′ and analogs thereof (as described in U.S. Pat. No. 8,278,283, which is hereby incorporated by reference in its entirety);
[0531] d) 4′-CH₂—N(OCH₃)-2′ and analogs thereof (as described in U.S. Pat. No. 8,278,425, which is hereby incorporated by reference in its entirety);
[0532] e) 4′-CH₂—O—N(CH₃)-2′ and analogs thereof (as described in U.S. Patent Publication No. 2004/0171570, which is hereby incorporated by reference in its entirety);
[0533] f) 4′-CH₂—C(H) (CH₃)-2′ and analogs thereof (as described in Chattopadhyaya et al., J. ORG. CHEM., 2009, 74, 118-34, which is hereby incorporated by reference in its entirety); and
[0534] g) 4′-CH₂—C(═CH₂)-2′ and analogs thereof as described in U.S. Pat. No. 8,278,426, which is hereby incorporated by reference in its entirety).

[0535] In certain embodiments, the bicyclic nucleotide (BN) is one or more of the following: (a) methyleneoxy BN, (b) ethyleneoxy BN, (c) aminooxy BN; (d) oxyamino BN, (e) methyl(methyleneoxy) BN (also known as constrained ethyl or cET), (f) methylene-thio BN, (g) methylene amino BN, (h) methyl carbocyclic BN, and (i) propylene carbocyclic BN, as shown below.

[chemical structure]

[chemical structure]

[0536] In the bicyclic nucleotides of (a) to (i) above, B is a nucleobase, R₂ is H or CH₃ and Wₐ and W_{b} are each independently, H, OH, a hydroxyl protecting group, a phosphorous moiety, or an internucleotide linking group attaching the bicyclic nucleotide to another nucleotide or to an oligonucleotide and wherein at least one of Wₐ or W_{b} is an internucleotide linking group attaching the bicyclic nucleotide to an oligonucleotide.

[0537] In one embodiment of the oxyamino BN (d), R₂ is CH₃, as follows (also known as BNA^{NC}[NMe]):

[chemical structure]

[0538] In certain embodiments, bicyclic sugar moieties and bicyclic nucleotides incorporating such bicyclic sugar moieties are further defined by isomeric configuration. In certain embodiments, the bicyclic sugar moiety or nucleotide is in the α-L configuration. In certain embodiments, the bicyclic sugar moiety or nucleotide is in the β-D configuration. For example, in certain embodiments, the bicyclic sugar moiety or nucleotide comprises a 2′O,4′-C-methylene bridge (2′-O—CH₂-4′) in the α-L configuration (α-L LNA). In certain embodiments, the bicyclic sugar moiety or nucleotide is in the R configuration. In certain embodiments, the bicyclic sugar moiety or nucleotide is in the S configuration. For example, in certain embodiments, the bicyclic sugar moiety or nucleotide comprises a 4′-CH(CH₃)—O-2′ bridge (i.e., cEt) in the S-configuration.

### Tricyclic Nucleotides

[0539] In some embodiments, the Tm-increasing nucleotide is a tricyclic nucleotide. The synthesis of tricyclic nucleotides and their incorporation into nucleic acid compounds has also been reported in the literature, including, for example, Steffens et al., J. AM. CHEM. SOC. 1997; 119:11548-549; Steffens et al., J. ORG. CHEM. 1999; 121 (14): 3249-55; Renneberg et al., J. AM. CHEM. SOC. 2002; 124:5993-6002; Ittig et al., NUCLEIC ACIDS RES. 2004; 32 (1): 346-53; Scheidegger et al., CHEMISTRY 2006; 12:8014-23; Ivanova et al., OLIGONUCLEOTIDES 2007; 17:54-65; each of which is each hereby incorporated by reference in its entirety.

[0540] In certain embodiments, the tricyclic nucleotide is a tricyclo nucleotide (also called tricyclo DNA) in which the 3′-carbon and 5′-carbon centers are connected by an ethylene that is fused to a cyclopropane ring, as discussed for example in Leumann C J, BIOORG. MED. CHEM. 2002; 10:841-54 and published U.S. Applications 2015/0259681 and 2018/0162897, which are each hereby incorporated by reference. In certain embodiments, the tricyclic nucleotide comprises a substituted furanosyl ring comprising a bridge that connects the 2′-carbon and the 4′-carbon of the furanosyl to form a second ring, and a third fused ring resulting from a group connecting the 5′-carbon to the methylene group of the bridge that connects the 2′-carbon and the 4′-carbon of the furanosyl, as discussed, for example, in published U.S. Application 2015/0112055, which is hereby incorporated by reference.

### Other Tₘ-Increasing Nucleotides

[0541] In addition to bicyclic and tricyclic nucleotides, other Tₘ-increasing nucleotides can be used in the RNAi oligonucleotides described herein. For example, in certain embodiments, the Tₘ-increasing nucleotide is a G-clamp, guanidine G-clamp or analogue thereof (Wilds et al., CHEM, 2002; 114:123 and Wilds et al., CHIM ACTA 2003; 114:123), a hexitol nucleotide (Herdewijn, CHEM. BIODIVERSITY 2010; 7:1-59), or a modified nucleotide. The modified nucleotide can have a modified nucleobase, as described herein, including for example, 5-bromo-uracil, 5-iodo-uracil, 5-propynyl-modified pyrimidines, or 2-amino adenine (also called 2,6-diaminopurine) (Deleavey et al., CHEM. & BIOL. 2012; 19:937-54) or 2-thio uridine, 5 Me-thio uridine, and pseudo uridine. The modified nucleotide can also have a modified sugar moiety, as described for example, in U.S. Pat. No. 8,975,389, which is hereby incorporated by reference, or as described herein, except that the Tₘ-increasing nucleotide is not modified at the 2′-carbon of the sugar moiety with a 2′-F or a 2′-OMe.

[0542] In certain embodiments, the Tₘ-increasing nucleotide is a bicyclic nucleotide. In certain embodiments, the Tₘ-increasing nucleotide is a tricyclic nucleotide. In certain embodiments, the Tₘ-increasing nucleotide a G-clamp, guanidine G-clamp or analogue thereof. In certain embodiments, the Tₘ-increasing nucleotide is a hexitol nucleotide. In certain embodiments, the Tₘ-increasing nucleotide is a bicyclic or tricyclic nucleotide. In certain embodiments, the Tₘ-increasing nucleotide is a bicyclic nucleotide, a tricyclic nucleotide, or a G-clamp, guanidine G-clamp or analogue thereof. In certain embodiments, the Tₘ-increasing nucleotide is a bicyclic nucleotide, a tricyclic nucleotide, a G-clamp, guanidine G-clamp or analogue thereof, or a hexitol nucleotide.

[0543] In certain embodiments, the Tₘ-increasing nucleotide increases the Tₘ of the nucleic acid inhibitor molecule by at least 2° C. per incorporation. In certain embodiments, the Tₘ-increasing nucleotide increases the Tₘ of nucleic acid inhibitor molecule by at least 3° C. per incorporation. In certain embodiments, the Tₘ-increasing nucleotide increases the Tₘ of nucleic acid inhibitor molecule by at least 4° C. per incorporation. In certain embodiments, the Tₘ-increasing nucleotide increases the Tₘ of nucleic acid inhibitor molecule by at least 5° C. per incorporation.

### Targeting Ligands

[0544] In some embodiments, it is desirable to target the oligonucleotides of the disclosure (e.g., lipid-conjugated RNAi oligonucleotides) to one or more cells or tissues of the central nervous system (CNS). In some embodiments, it is desirable to target the oligonucleotides of the disclosure (e.g., lipid-conjugated RNAi oligonucleotides) to one or more cells or tissues of the liver. In some embodiments, it is desirable to target the oligonucleotides of the disclosure (e.g., lipid-conjugated RNAi oligonucleotides) to one or more cells or tissues of the eye.

[0545] Such a strategy can help to avoid undesirable effects in other organs or avoid undue loss of the oligonucleotide to cells, tissue or organs that would not benefit from the oligonucleotide. Accordingly, in some embodiments, a lipid-conjugated RNAi oligonucleotide disclosed herein is modified to facilitate targeting and/or delivery to a particular tissue, cell, or organ (e.g., to facilitate delivery of the conjugate to the CNS). In some embodiments, a lipid-conjugated RNAi oligonucleotide comprises at least one nucleotide (e.g., 1, 2, 3, 4, 5, 6 or more nucleotides) conjugated to one or more targeting ligand(s).

[0546] In some embodiments, 1 or more (e.g., 1, 2, 3, 4, 5 or 6) nucleotides of a lipid-conjugated RNAi oligonucleotide disclosed herein are each conjugated to a separate targeting ligand. In some embodiments, 1 nucleotide of a lipid-conjugated RNAi oligonucleotide herein is conjugated to a separate targeting ligand. In some embodiments, 2 to 4 nucleotides of a lipid-conjugated RNAi oligonucleotide herein are each conjugated to a separate targeting ligand. In some embodiments, targeting ligands are conjugated to 2 to 4 nucleotides at either ends of the sense or antisense strand (e.g., targeting ligands are conjugated to a 2 to 4 nucleotide overhang or extension on the 5′ or 3′ end of the sense or antisense strand) such that the targeting ligands resemble bristles of a toothbrush and the lipid-conjugated RNAi oligonucleotide resembles a toothbrush. For example, a lipid-conjugated RNAi oligonucleotide may comprise a stem-loop at either the 5′ or 3′ end of the sense strand and 1, 2, 3 or 4 nucleotides of the loop of the stem may be individually conjugated to a targeting ligand. In some embodiments, a lipid-conjugated RNAi oligonucleotide provided by the disclosure comprises a stem-loop at the 3′ end of the sense strand, wherein the loop of the stem-loop comprises a triloop or a tetraloop, and wherein the 3 or 4 nucleotides comprising the triloop or tetraloop, respectfully, are individually conjugated to a targeting ligand.

[0547] GalNAc is a high affinity ligand for the ASGPR, which is primarily expressed on the sinusoidal surface of hepatocyte cells and has a major role in binding, internalizing and subsequent clearing circulating glycoproteins that contain terminal galactose or GalNAc residues (asialoglycoproteins). Conjugation (either indirect or direct) of GalNAc moieties to oligonucleotide of the instant disclosure can be used to target these oligonucleotides to the ASGPR expressed on cells. In some embodiments, an oligonucleotide of the instant disclosure is conjugated to at least one or more GalNAc moieties, wherein the GalNAc moieties target the oligonucleotide to an ASGPR expressed on human liver cells (e.g., human hepatocytes). In some embodiments, the GalNAc moiety target the oligonucleotide to the liver.

[0548] In some embodiments, an oligonucleotide of the disclosure is conjugated directly or indirectly to a monovalent GalNAc. In some embodiments, the oligonucleotide is conjugated directly or indirectly to more than one monovalent GalNAc (i.e., is conjugated to 2, 3 or 4 monovalent GalNAc moieties, and is typically conjugated to 3 or 4 monovalent GalNAc moieties). In some embodiments, an oligonucleotide is conjugated to one or more bivalent GalNAc, trivalent GalNAc or tetravalent GalNAc moieties.

[0549] In some embodiments, 1 or more (e.g., 1, 2, 3, 4, 5 or 6) nucleotides of an oligonucleotide are each conjugated to a GalNAc moiety. In some embodiments, 2 to 4 nucleotides of a tetraloop are each conjugated to a separate GalNAc. In some embodiments, 1 to 3 nucleotides of a triloop are each conjugated to a separate GalNAc. In some embodiments, targeting ligands are conjugated to 2 to 4 nucleotides at either ends of the sense or antisense strand (e.g., ligands are conjugated to a 2 to 4 nucleotide overhang or extension on the 5′ or 3′ end of the sense or antisense strand) such that the GalNAc moieties resemble bristles of a toothbrush and the oligonucleotide resembles a toothbrush. In some embodiments, GalNAc moieties are conjugated to a nucleotide of the sense strand. For example, four (4) GalNAc moieties can be conjugated to nucleotides in the tetraloop of the sense strand where each GalNAc moiety is conjugated to 1 nucleotide.

[0550] In some embodiments, the tetraloop is any combination of adenine and guanine nucleotides. In some embodiments, the tetraloop is any combination of adenine, guanine, cytosine, and uridine nucleotides.

[0551] In some embodiments, the tetraloop (L) has a monovalent GalNAc moiety attached to any one or more guanine nucleotides of the tetraloop via any linker described herein, as depicted below (X=heteroatom):

[chemical structure]

[0552] In some embodiments, the tetraloop (L) has a monovalent GalNAc attached to any one or more adenine nucleotides of the tetraloop via any linker described herein, as depicted below (X=heteroatom):

[chemical structure]

[0553] In some embodiments, a lipid-conjugated RNAi oligonucleotide herein comprises a monovalent GalNAc attached to a guanine nucleotide referred to as [ademG-GalNAc] or 2′-aminodiethoxymethanol-Guanine-GalNAc, as depicted below:

[chemical structure]

[0554] In some embodiments, a lipid-conjugated RNAi oligonucleotide herein comprises a monovalent GalNAc attached to an adenine nucleotide, referred to as [ademA-GalNAc] or 2′-aminodiethoxymethanol-Adenine-GalNAc, as depicted below:

[chemical structure]

[0555] An example of such conjugation is shown below for a loop comprising from 5′ to 3′ the nucleotide sequence GAAA (L=linker, X=heteroatom). Such a loop may be present, for is used to describe example, at positions 27-30 of the sense strand. In the chemical formula,

[chemical structure]

an attachment point to the oligonucleotide strand.

[chemical structure]

[0556] Appropriate methods or chemistry (e.g., click chemistry) can be used to link a targeting ligand to a nucleotide. In some embodiments, a targeting ligand is conjugated to a nucleotide using a click linker. In some embodiments, an acetal-based linker is used to conjugate a targeting ligand to a nucleotide of any one of the oligonucleotides described herein. Acetal-based linkers are disclosed, for example, in Intl. Patent Application Publication No. WO 2016/100401. In some embodiments, the linker is a labile linker. However, in other embodiments, the linker is stable. Examples are shown below for a loop comprising from 5′ to 3′ the nucleotides GAAA, in which GalNAc moieties are attached to nucleotides of the loop using an acetal linker. Such a loop may be present, for example, at positions 27-30 of the sense strand. In the chemical formula,

[chemical structure]

is an attachment point to the oligonucleotide strand.

[chemical structure]

[chemical structure]

[0557] As mentioned, various appropriate methods or chemistry synthetic techniques (e.g., click chemistry) can be used to link a targeting ligand to a nucleotide. In some embodiments, a targeting ligand is conjugated to a nucleotide using a click linker. In some embodiments, an acetal-based linker is used to conjugate a targeting ligand to a nucleotide of any one of the oligonucleotides described herein. Acetal-based linkers are disclosed, for example, in Intl. Patent Application Publication No. WO 2016/100401. In some embodiments, the linker is a labile linker. However, in other embodiments, the linker is a stable linker.

[0558] In some embodiments, a duplex extension (e.g., of up to 3, 4, 5 or 6 bp in length) is provided between a targeting ligand (e.g., a GalNAc moiety) and a lipid-conjugated RNAi oligonucleotide. In some embodiments, a lipid-conjugated RNAi oligonucleotide herein does not have a GalNAc conjugated thereto.

### Lipid Conjugates

[0559] In some embodiments, any of the lipid moieties described herein are conjugated to a nucleotide of the sense strand of the oligonucleotide. In some embodiments, a lipid moiety is conjugated to a terminal position of the oligonucleotide. In some embodiments, the lipid moiety is conjugated to the 5′ terminal nucleotide of the sense strand. In some embodiments, the lipid moiety is conjugated to the 3′ terminal nucleotide of the sense strand.

[0560] In some embodiments, the lipid moiety is conjugated to an internal nucleotide on the sense strand. An internal position is any nucleotide position other than the two terminal positions from each end of the sense strand. In some embodiments, the lipid moiety is conjugated to one or more internal positions of the sense strand. In some embodiments, the lipid moiety is conjugated to position 1, position 2, position 3, position 4, position 5, position 6, position 7, position 8, position 9, position 10, position 11, position 12, position 13, position 14, position 15, position 16, position 17, position 18, position 19, position 20, position 21, position 22, position 23, position 24, position 25, position 26, position 27, position 28, position 29, position 30, position 31, position 32, position 33, position 34, position 35, position 36, position 37 or position 38 of a sense strand. In some embodiments, the lipid moiety is conjugated to position 1 of the sense strand. In some embodiments, the lipid moiety is conjugated to position 2 of the sense strand. In some embodiments, the lipid moiety is conjugated to position 4 of the sense strand. In some embodiments, the lipid moiety is conjugated to position 6 of the sense strand. In some embodiments, the lipid moiety is conjugated to position 8 of the sense strand. In some embodiments, the lipid moiety is conjugated to position 15 of the sense strand. In some embodiments, the lipid moiety is conjugated to position 28 of the sense strand. In some embodiments, the lipid moiety is conjugated to position 38 of the sense strand.

[0561] In some embodiments, the lipid moiety is conjugated to a nucleotide of the sense strand that forms a base pair with a nucleotide at position 20, position 19, position 18, position 17, position 16, position 15, position 14, position 13, or position 12 of the antisense strand. In some embodiments, the lipid moiety is conjugated to a nucleotide of the sense strand that forms a base pair with a nucleotide at position 16, position 14, or position 12 of the antisense strand. In some embodiments, the lipid moiety is conjugated to a nucleotide of the sense strand that forms a base pair with a nucleotide at position 20 of the antisense strand. In some embodiments, the lipid moiety is conjugated to a nucleotide of the sense strand that forms a base pair with a nucleotide at position 19 of the antisense strand. In some embodiments, the lipid moiety is conjugated to a nucleotide of the sense strand that forms a base pair with a nucleotide at position 18 of the antisense strand. In some embodiments, the lipid moiety is conjugated to a nucleotide of the sense strand that forms a base pair with a nucleotide at position 17 of the antisense strand. In some embodiments, the lipid moiety is conjugated to a nucleotide of the sense strand that forms a base pair with a nucleotide at position 16 of the antisense strand. In some embodiments, the lipid moiety is conjugated to a nucleotide of the sense strand that forms a base pair with a nucleotide at position 15 of the antisense strand. In some embodiments, the lipid moiety is conjugated to a nucleotide of the sense strand that forms a base pair with a nucleotide at position 14 of the antisense strand. In some embodiments, the lipid moiety is conjugated to a nucleotide of the sense strand that forms a base pair with a nucleotide at position 13 of the antisense strand. In some embodiments, the lipid moiety is conjugated to a nucleotide of the sense strand that forms a base pair with a nucleotide at position 12 of the antisense strand.

[0562] In some embodiments, a lipid-conjugated RNAi oligonucleotide described herein comprises at least one nucleotide conjugated with one or more lipid moieties. In some embodiments, the one or more lipid moieties are conjugated to the same nucleotide. In some embodiments, the one or more lipid moieties are conjugated to different nucleotides. In some embodiments, one, two, three, four, five, or six lipid moieties are conjugated to the oligonucleotide. In some embodiments, one or more lipid moieties are conjugated to an adenine nucleotide. In some embodiments, one or more lipid moieties are conjugated to a guanine nucleotide. In some embodiments, one or more lipid moieties are conjugated to a cytosine nucleotide. In some embodiments, one or more lipid moieties are conjugated to a thymine nucleotide. In some embodiments, one or more lipid moieties are conjugated to a uracil nucleotide.

[0563] In some embodiments, the lipid moiety is a hydrocarbon chain. In some embodiments, the hydrocarbon chain is saturated. In some embodiments, the hydrocarbon chain is unsaturated. In some embodiments, the hydrocarbon chain is branched. In some embodiments, the hydrocarbon chain is straight. In some embodiments, the lipid moiety is a C8-C30 hydrocarbon chain. In some embodiments, the lipid moiety is a C8:0, C10:0, C11:0, C12:0, C14:0, C16:0, C17:0, C18:0, C18:1, C18:2, C22:5, C22:0, C24:0, C26:0, C22:6, C24:1, diacyl C16:0 or diacyl C18:1.

[0564] In some embodiments, the lipid moiety is a C16 hydrocarbon chain.

[0565] In some embodiments, the lipid moiety is conjugated to the oligonucleotide via a linker. In some embodiments, a nucleotide of the lipid-conjugated oligonucleotide is represented by formula II-b or II-c:

[chemical structure]

[0566] or a pharmaceutically acceptable salt thereof, wherein:
[0567] L1 is a covalent bond, a monovalent or a bivalent saturated or unsaturated, straight, or branched C₁₋₅₀ hydrocarbon chain, wherein 0-10 methylene units of the hydrocarbon chain are independently replaced by -Cy-, —O—, —C(O)NR—, —NR—, —S—, —C(O)—, —C(O)O—, —S(O)—, —S(O)₂—, —P(O)OR—, —P(S)OR—, or

[chemical structure]

[0568] R⁴ is hydrogen, R^{A}, or a suitable amine protection group; and
[0569] R⁵ is adamantyl, or a saturated or unsaturated, straight, or branched C₁₋₅₀ hydrocarbon chain, wherein 0-10 methylene units of the hydrocarbon chain are independently replaced by —O—, —C(O)NR—, —NR—, —S—, —C(O)—, —C(O)O—, —S(O)—, —S(O)₂—, —P(O)OR—, or —P(S)OR.

[0570] In some embodiments of the lipid-conjugated RNAi oligonucleotide. R⁵ is selected from

[chemical structure]

[0571] In certain embodiments of the lipid-conjugated RNAi oligonucleotide.
[0572] R⁵ is selected from

[chemical structure]

[0573] In some embodiments. R⁵ is

[chemical structure]

[0574] In some embodiments. R⁵ is

[chemical structure]

[0575] In some embodiments. R⁵ is.

[chemical structure]

[0576] In some embodiments, a nucleotide of the lipid-conjugated RNAi oligonucleotide is represented by formula II-Ib or II-Ic:

[chemical structure]

[0577] or a pharmaceutically acceptable salt thereof; wherein
[0578] B is a nucleobase or hydrogen;
[0579] m is 1-50;
[0580] X¹ is —O—, or —S—;
[0581] Y is hydrogen,

[chemical structure]

[0582] R³ is hydrogen, or a suitable protecting group;
[0583] X² is O, or S;
[0584] X³ is —O—, —S—, or a covalent bond;
[0585] Y¹ is a linking group attaching to the 2′- or 3′-terminal of a nucleoside, a nucleotide, or an oligonucleotide;
[0586] Y² is hydrogen, a phosphoramidite analogue, an internucleotide linking group attaching to the 5′-terminal of a nucleoside, a nucleotide, or an oligonucleotide, or a linking group attaching to a solid support;
[0587] R⁵ is adamantyl, or a saturated or unsaturated, straight, or branched C₁₋₅₀ hydrocarbon chain, wherein 0-10 methylene units of the hydrocarbon chain are independently replaced by —O—, —C(O)NR—, —NR—, —S—, —C(O)—, —C(O)O—, —S(O)—, —S(O)₂—, —P(O)OR—, or —P(S)OR—; and
[0588] R is hydrogen, a suitable protecting group, or an optionally substituted group selected from C₁₋₆ aliphatic, phenyl, a 4-7 membered saturated or partially unsaturated heterocyclic having 1-2 heteroatoms independently selected from nitrogen, oxygen, and sulfur, and a 5-6 membered heteroaryl ring having 1-4 heteroatoms independently selected from nitrogen, oxygen, and sulfur.

[0589] In some embodiments, the lipid is

[chemical structure]

[0590] In some embodiments, the oligonucleotide of the oligonucleotide-ligand conjugate is a double-stranded molecule. In some embodiments, the oligonucleotide is an RNAi molecule. In some embodiments, the double stranded oligonucleotide comprises a stem loop. In some embodiments, the stem loop is set forth as S1-L-S2, wherein S1 is complementary to S2, and wherein L forms a loop between S1 and S2. In some embodiments, the ligand is conjugated to any of the nucleotides in the loop of the stem loop. In some embodiments, the ligand is conjugated to any of the nucleotides in the stem of the stem loop. In some embodiments, the ligand is conjugated to the first nucleotide from 5′ to 3′ in the loop. In some embodiments, the ligand is conjugated to the second nucleotide from 5′ to 3′ in the loop. In some embodiments, the ligand is conjugated to the third nucleotide from 5′ to 3′ in the loop. In some embodiments, the ligand is conjugated to the fourth nucleotide from 5′ to 3′ in the loop. In some embodiments, the ligand is conjugated to one, two, three, or four of the nucleotides in the loop. In some embodiments, the ligand is conjugated to three of the nucleotides in the stem loop.

[0591] In some embodiments, the stem loop is 16 nucleotides in length. In some embodiments, the ligand is conjugated to the third nucleotide from 5′ to 3′ in the stem loop. In some embodiments, the ligand is conjugated to the eighth nucleotide from 5′ to 3′ in the stem loop. In some embodiments, the ligand is conjugated to the ninth nucleotide from 5′ to 3′ in the stem loop. In some embodiments, the ligand is conjugated to the tenth nucleotide from 5′ to 3′ in the stem loop.

### Exemplary Oligonucleotides

[0592] In some embodiments, the lipid-conjugated RNAi oligonucleotide comprises a nucleotide conjugated with a fatty acid. In some embodiments, the fatty acid is a saturated fatty acid. In some embodiments, the fatty acid is an unsaturated fatty acid. In some embodiments, lipid-conjugated RNAi oligonucleotide comprises a nucleotide conjugated with a lipid. In some embodiments, the lipid is a carbon chain. In some embodiments, the carbon chain is saturated. In some embodiments, the carbon chain is unsaturated. In some embodiments, the lipid-conjugated RNAi oligonucleotide comprises a nucleotide conjugated with a 16-carbon (C16) lipid. In some embodiments, the C16 lipid comprises at least one double bond. In some embodiments, the lipid-conjugated RNAi oligonucleotide comprises a nucleotide conjugated with a 22-carbon (C22) lipid.

[0593] In some embodiments, the oligonucleotide of the lipid-conjugated RNAi oligonucleotide is conjugated to a C16 lipid as shown in:

[chemical structure]

[0594] In some embodiments, the oligonucleotide of the lipid-conjugated RNAi oligonucleotide is conjugated to a C22 lipid as shown in:

[chemical structure]

[0595] In some embodiments, the 3′ end of the sense strand is a blunt end. In some embodiments, the 5′ end of the antisense strand is a blunt end. In some embodiments, the 3′ end of the antisense strand comprises an overhang. In some embodiments, the 5′ end of the antisense strand comprises an overhang. In some embodiments, the 5′ and 3′ ends of the antisense strand each comprise an overhang.

[0596] In some embodiments, the lipid-conjugated RNAi oligonucleotide comprises one or more 2′ modifications. In some embodiments, the 2′ modifications are selected from 2′-fluoro and 2′-methyl.

[0597] In some embodiments, a lipid-conjugated RNAi oligonucleotide for reducing expression of a target gene comprises the modification pattern of

Sense Strand:
5′-[mXs][mXs][mX][mX][mX][ademX-L][mX][mX][mX][mX]
[mX][mX][mX][mX][mX][mX][mX][mX][mX][mX][mX][fX]
[fX][fX][fX][mX][mX][mX][mX][mX][mX][mXs][mXs]
[mX]-3′

### Hybridized to:

Antisense Strand:
5′-[MePhosphonate-4O-mXs][fXs][fXs][fX][fX][mX]
[fX][mX][mX][fX][mX][mX][mX][fX][mX][mX][mX][mX]
[mX][mXs][mXs][mX]-3′

[0598] wherein [mXs]=2′-O-methyl modified nucleotide with a phosphorothioate linkage to the neighboring nucleotide, [fXs]=2′-fluoro modified nucleotide with a phosphorothioate linkage to the neighboring nucleotide, [mX]=2′-O-methyl modified nucleotide with phosphodiester linkages to neighboring nucleotides, [fX]=2′-fluoro modified nucleotide with phosphodiester linkages to neighboring nucleotides, [MePhosphonate-4O-mX]=4′-O-monomethylphosphonate-2′-O-methyl modified nucleotide, and [ademX-L]=Lipid attached to a nucleotide.

[0599] In some embodiments, a lipid-conjugated RNAi oligonucleotide for reducing expression of a target gene comprises the modification pattern of

Sense Strand:
5′-[+X][mX][mX][ademX-L][mX][mX][mX][+X][mX][mX]
[mX][mX][mX][mX][mX][mX][mX][fX][fX][fX][fX][mX]
[mX][mX][mX][mXs][mXs][mX]-3′

### Hybridized to:

Antisense Strand:
5′-[MePhosphonate-4O-mXs][fXs][fXs][fX][fX][mX]
[fX][mX][mX][fX][mX][mX][mX][fX][mX][mX][mX][mX]
[mX][mXs][mXs][mX]-3′

[0600] wherein [mXs]=2′-O-methyl modified nucleotide with a phosphorothioate linkage to the neighboring nucleotide, [fXs]=2′-fluoro modified nucleotide with a phosphorothioate linkage to the neighboring nucleotide, [mX]=2′-O-methyl modified nucleotide with phosphodiester linkages to neighboring nucleotides, [fX]=2′-fluoro modified nucleotide with phosphodiester linkages to neighboring nucleotides, [MePhosphonate-4O-mX]=4′-O-monomethylphosphonate-2′-O-methyl modified nucleotide, [ademX-L]=Lipid attached to a nucleotide, [+X]=a Tm-increasing nucleotide, optionally an LNA, and [+Xs]=a Tm-increasing nucleotide with a phosphorothioate linkage to the neighboring nucleotide, optionally an LNA.

[0601] In some embodiments, a lipid-conjugated RNAi oligonucleotide for reducing expression of a target gene comprises the modification pattern of

Sense Strand:
5′-[+X][mX][mX][mX][mX][ademX-L][mX][mX][mX][mX]
[mX][+X][mX][mX][mX][mX][mX][mX][mX][mX][mX][fX]
[fX][fX][fX][mX][mX][mX][mX][mX][mX][mXs][mXs]
[mX]-3′

### Hybridized to:

Antisense Strand:
5′-[MePhosphonate-4O-mXs][fXs][fXs][fX][fX][mX]
[fX][mX][mX][fX][mX][mX][mX][fX][mX][mX][mX][mX]
[mX][mXs][mXs][mX]-3′

[0602] wherein [mXs]=2′-O-methyl modified nucleotide with a phosphorothioate linkage to the neighboring nucleotide, [fXs]=2′-fluoro modified nucleotide with a phosphorothioate linkage to the neighboring nucleotide, [mX]=2′-O-methyl modified nucleotide with phosphodiester linkages to neighboring nucleotides, [fX]=2′-fluoro modified nucleotide with phosphodiester linkages to neighboring nucleotides, [MePhosphonate-4O-mX]=4′-O-monomethylphosphonate-2′-O-methyl modified nucleotide, [ademX-L]=Lipid attached to a nucleotide, [+X]=a Tm-increasing nucleotide, optionally an LNA, and [+Xs]=a Tm-increasing nucleotide with a phosphorothioate linkage to the neighboring nucleotide, optionally an LNA.

[0603] In some embodiments, a lipid-conjugated RNAi oligonucleotide for reducing expression of a target gene comprises the modification pattern of

Sense Strand:
5′-[ademX-Ls][mX][mX][mX][mX][mX][mX][fX][fX][fX]
[fX][mX][mX][mX][mX][mXs][mXs][mX]-3′

### Hybridized to:

Antisense Strand:
5′-[MePhosphonate-4O-mXs][fXs][fXs][fX][fX][mX]
[fX][mX][mX][fX][mX][mX][mX][fX][mX][mX][mX][mX]
[mX][mXs][mXs][mX]-3′

[0604] wherein [mXs]=2′-O-methyl modified nucleotide with a phosphorothioate linkage to the neighboring nucleotide, [fXs]=2′-fluoro modified nucleotide with a phosphorothioate linkage to the neighboring nucleotide, [mX]=2′-O-methyl modified nucleotide with phosphodiester linkages to neighboring nucleotides, [fX]=2′-fluoro modified nucleotide with phosphodiester linkages to neighboring nucleotides, [MePhosphonate-4O-mX]=4′-O-monomethylphosphonate-2′-O-methyl modified nucleotide, and [ademX-Ls]=Lipid attached to a nucleotide with a phosphorothioate linkage to the neighboring nucleotide.

[0605] In some embodiments, a lipid-conjugated RNAi oligonucleotide for reducing expression of a target gene comprises the modification pattern of

Sense Strand:
5′-[ademX-Ls][mX][mX][mX][mX][mX][mX][fX][fX][fX]
[fX][mX][mX][mX][mXs][mXs][mX]-3′

### Hybridized to:

Antisense Strand:
5'-[MePhosphonate-4O-mXs][fXs][fXs][fX][fX][mX]
[fX][mX][mX][fX][mX][mX][mX][fX][mX][mX][mX][mX]
[mX][mXs][mXs][mX]-3′

[0606] wherein [mXs]=2′-O-methyl modified nucleotide with a phosphorothioate linkage to the neighboring nucleotide, [fXs]=2′-fluoro modified nucleotide with a phosphorothioate linkage to the neighboring nucleotide, [mX]=2′-O-methyl modified nucleotide with phosphodiester linkages to neighboring nucleotides, [fX]=2′-fluoro modified nucleotide with phosphodiester linkages to neighboring nucleotides, [MePhosphonate-4O-mX]=4′-O-monomethylphosphonate-2′-O-methyl modified nucleotide, and [ademX-Ls]=Lipid attached to a nucleotide with a phosphorothioate linkage to the neighboring nucleotide.

[0607] In some embodiments, a lipid-conjugated RNAi oligonucleotide for reducing expression of a target gene comprises the modification pattern of

Sense Strand:
5′-[ademX-Ls][+X][mX][mX][mX][mX][mX][fX][fX][fX]
[fX][mX][mX][mXs][+Xs][+X]-3′

### Hybridized to:

Antisense Strand:
5′-[MePhosphonate-4O-mXs][fXs][fXs][fX][fX][mX]
[fX][mX][mX][fX][mX][mX][mX][fX][mX][mX][mX][mX]
[mX][mXs][mXs][mX]-3′

[0608] wherein [mXs]=2′-O-methyl modified nucleotide with a phosphorothioate linkage to the neighboring nucleotide, [fXs]=2′-fluoro modified nucleotide with a phosphorothioate linkage to the neighboring nucleotide, [mX]=2′-O-methyl modified nucleotide with phosphodiester linkages to neighboring nucleotides, [fX]=2′-fluoro modified nucleotide with phosphodiester linkages to neighboring nucleotides, [MePhosphonate-4O-mX]=4′-O-monomethylphosphonate-2′-O-methyl modified nucleotide, [ademX-Ls]=Lipid attached to a nucleotide with a phosphorothioate linkage to the neighboring nucleotide, [+X]=a Tm-increasing nucleotide, optionally an LNA, and [+Xs]=a Tm-increasing nucleotide with a phosphorothioate linkage to the neighboring nucleotide, optionally an LNA or BNA.

[0609] In some embodiments, a lipid-conjugated RNAi oligonucleotide for reducing expression of a target gene comprises the modification pattern of

Sense Strand:
5′-[ademX-Ls][mX][mX][mX][mX][mX][mX][fX][fX][fX]
[fX][mX][mX][mX][mX][mXs][mXs][mX]-3′

### Hybridized to:

Antisense Strand:
5′-[MePhosphonate-4O-mXs][fXs][fXs][fX][fX][mX]
[fX][mX][mX][fX][mX][mX][mX][fX][mX][mX][mX][mX]
[mX][mXs][mXs][mX]-3′

[0610] wherein [mXs]=2′-O-methyl modified nucleotide with a phosphorothioate linkage to the neighboring nucleotide, [fXs]=2′-fluoro modified nucleotide with a phosphorothioate linkage to the neighboring nucleotide, [mX]=2′-O-methyl modified nucleotide with phosphodiester linkages to neighboring nucleotides, [fX]=2′-fluoro modified nucleotide with phosphodiester linkages to neighboring nucleotides, [MePhosphonate-4O-mX]=4′-O-monomethylphosphonate-2′-O-methyl modified nucleotide, and [ademX-Ls]=Lipid attached to a nucleotide with a phosphorothioate linkage to the neighboring nucleotide.

[0611] In some embodiments, a lipid-conjugated RNAi oligonucleotide for reducing expression of a target gene comprises the modification pattern of

Sense Strand:
5′-[ademX-Ls][mX][mX][mX][mX][mX][mX][fX][fX][fX]
[fX][mX][mX][mX][mX][mX][mX][mX][mX][mX][mX][mX]
[mX][mX][mX][mX][mX][mX][mX][mX][mX][mX][mX][mX]
[mX][mX]-3′

### Hybridized to:

Antisense Strand:
5'-[MePhosphonate-4O-mXs][fXs][fXs][fX][X][mX]
[fX][mX][mX][fX][mX][mX][mX][fX][mX][mX][mX][mX]
[mX][mXs][mXs][mX]-3'

[0612] wherein [mXs]=2′-O-methyl modified nucleotide with a phosphorothioate linkage to the neighboring nucleotide, [fXs]=2′-fluoro modified nucleotide with a phosphorothioate linkage to the neighboring nucleotide, [mX]=2′-O-methyl modified nucleotide with phosphodiester linkages to neighboring nucleotides, [fX]=2′-fluoro modified nucleotide with phosphodiester linkages to neighboring nucleotides, [MePhosphonate-4O-mX]=4′-O-monomethylphosphonate-2′-O-methyl modified nucleotide, and [ademX-Ls]=Lipid attached to a nucleotide with a phosphorothioate linkage to the neighboring nucleotide.

[0613] In some embodiments, a lipid-conjugated RNAi oligonucleotide for reducing expression of a target gene comprises the modification pattern of

Sense Strand:
5'-[+Xs][ademX-L][fX][X][fX][fX][mX][mX][mX][X]
[+Xs][mXs][mX]-3'

### Hybridized to:

Antisense Strand:
5'-[MePhosphonate-4O-mXs][fXs][fXs][fX][fX][mX]
[fX][mX][mX][fX][mX][X][mX][fX][mX][X][mX][mX]
[mX][mXs][mXs][mX]-3'

[0614] wherein [mXs]=2′-O-methyl modified nucleotide with a phosphorothioate linkage to the neighboring nucleotide, [fXs]=2′-fluoro modified nucleotide with a phosphorothioate linkage to the neighboring nucleotide, [mX]=2′-O-methyl modified nucleotide with phosphodiester linkages to neighboring nucleotides, [fX]=2′-fluoro modified nucleotide with phosphodiester linkages to neighboring nucleotides, [MePhosphonate-4O-mX]=4′-O-monomethylphosphonate-2′-O-methyl modified nucleotide, [ademX-L]=Lipid attached to a nucleotide, [+X]=a Tm-increasing nucleotide, optionally an LNA, and [+Xs]=a Tm-increasing nucleotide with a phosphorothioate linkage to the neighboring nucleotide, optionally an LNA.

[0615] In some embodiments, a lipid-conjugated RNAi oligonucleotide for reducing expression of a target gene comprises the modification pattern of

Sense Strand:
5'-[+Xs][ademX-L][fX][X][fX][fX][mX][mX][mX][+X]
[+Xs][mXs][mX]-3'

### Hybridized to:

Antisense Strand:
5'-[MePhosphonate-4O-mXs][fXs][fXs][fX][fX][mX]
[fX][mX][mX][fX][mX][mX][mX][fX][mX][mX][mX][mX]
[mX][mXs][mXs][mX]-3'

[0616] wherein [mXs]=2′-O-methyl modified nucleotide with a phosphorothioate linkage to the neighboring nucleotide, [fXs]=2′-fluoro modified nucleotide with a phosphorothioate linkage to the neighboring nucleotide, [mX]=2′-O-methyl modified nucleotide with phosphodiester linkages to neighboring nucleotides, [fX]=2′-fluoro modified nucleotide with phosphodiester linkages to neighboring nucleotides, [MePhosphonate-4O-mX]=4′-O-monomethylphosphonate-2′-O-methyl modified nucleotide, [ademX-L]=Lipid attached to a nucleotide, [+X]=a Tm-increasing nucleotide, optionally an LNA, and [+Xs]=a Tm-increasing nucleotide with a phosphorothioate linkage to the neighboring nucleotide, optionally an LNA.

[0617] In some embodiments, a lipid-conjugated RNAi oligonucleotide for reducing expression of a target gene comprises the modification pattern of

Sense Strand:
5'-[ademX-Ls][mX][mX][mX][mX][mX][mX][X][fX][fX]
[fX][mX][mX][mX][mX][mX][mX][mXs][mXs][mX]-3'

### Hybridized to:

Antisense Strand:
5'-[MePhosphonate-4O-mXs][fXs][fXs][fX][fX][mX]
[fX][mX][mX][fX][mX][mX][mX][fX][mX][mX][mX][mX]
[mX][mXs][mXs][mX]-3'

[0618] wherein [mXs]=2′-O-methyl modified nucleotide with a phosphorothioate linkage to the neighboring nucleotide, [fXs]=2′-fluoro modified nucleotide with a phosphorothioate linkage to the neighboring nucleotide, [mX]=2′-O-methyl modified nucleotide with phosphodiester linkages to neighboring nucleotides, [fX]=2′-fluoro modified nucleotide with phosphodiester linkages to neighboring nucleotides, [MePhosphonate-4O-mX]=4′-O-monomethylphosphonate-2′-O-methyl modified nucleotide, [ademX-Ls]=Lipid attached to a nucleotide with a phosphorothioate linkage to the neighboring nucleotide.

[0619] In some embodiments, a lipid-conjugated RNAi oligonucleotide for reducing expression of a target gene comprises the modification pattern of

Sense Strand:5'-[ademX-Ls][mX][mX][mX][mX][mX]
[mX][fX][fX][fX][fX][mX][mX][X][mX][mXs][mXs]
[mX]-3'

### Hybridized to:

Antisense Strand:
5'-[MePhosphonate-4O-mXs][fXs][fXs][fX][fX][mX]
[fX][X][mX][fX][mX][mX][mX][fX][mX][mX][mX][mX]
[mX][mXs][mXs][mX]-3'

[0620] wherein [mXs]=2′-O-methyl modified nucleotide with a phosphorothioate linkage to the neighboring nucleotide, [fXs]=2′-fluoro modified nucleotide with a phosphorothioate linkage to the neighboring nucleotide, [mX]=2′-O-methyl modified nucleotide with phosphodiester linkages to neighboring nucleotides, [fX]=2′-fluoro modified nucleotide with phosphodiester linkages to neighboring nucleotides, [MePhosphonate-4O-mX]=4′-O-monomethylphosphonate-2′-O-methyl modified nucleotide, [ademX-Ls]=Lipid attached to a nucleotide with a phosphorothioate linkage to the neighboring nucleotide.

[0621] In some embodiments, a lipid-conjugated RNAi oligonucleotide for reducing expression of a target gene comprises the modification pattern of

Sense Strand:
5'-[mXs][mXs][mX][mX][mX][ademX-C16][mX][mX][mX]
[mX][mX][mX][mX][mX][X][X][mX][mX][mX][mX][mX]
[fX][X][fX][fX][mX][mX][mX][mX][mX][X][mXs][mXs]
[mX]-3'

### Hybridized to:

Antisense Strand:
5'-[MePhosphonate-4O-mXs][fXs][fXs][fX][fX][mX]
[fX][mX][mX][fX][mX][X][mX][X][mX][mX][X][mX]
[mX][mXs][mXs][mX]-3'

[0622] wherein [mXs]=2′-O-methyl modified nucleotide with a phosphorothioate linkage to the neighboring nucleotide, [fXs]=2′-fluoro modified nucleotide with a phosphorothioate linkage to the neighboring nucleotide, [mX]=2′-O-methyl modified nucleotide with phosphodiester linkages to neighboring nucleotides, [fX]=2′-fluoro modified nucleotide with phosphodiester linkages to neighboring nucleotides, [MePhosphonate-4O-mX]=4′-O-monomethylphosphonate-2′-O-methyl modified nucleotide, and [ademX-C16]=C16 Lipid attached to a nucleotide.

[0623] In some embodiments, a lipid-conjugated RNAi oligonucleotide for reducing expression of a target gene comprises the modification pattern of

Sense Strand:
5'-[+X][mX][mX][ademX-C16][mX][X][X][+X][mX][mX]
[mX][X][mX][mX][mX][mX][mX][fX][fX][fX][fX][mX]
[mX][mX][mX][mXs][mXs][mX]-3'

### Hybridized to:

Antisense Strand:
5'-[MePhosphonate-4O-mXs][fXs][fXs][fX][fX][mX]
[fX][mX][mX][fX][mX][mX][mX][fX][mX][mX][mX]
[mX][mX][mXs][mXs][mX]-3'

[0624] wherein [mXs]=2′-O-methyl modified nucleotide with a phosphorothioate linkage to the neighboring nucleotide, [fXs]=2′-fluoro modified nucleotide with a phosphorothioate linkage to the neighboring nucleotide, [mX]=2′-O-methyl modified nucleotide with phosphodiester linkages to neighboring nucleotides, [fX]=2′-fluoro modified nucleotide with phosphodiester linkages to neighboring nucleotides, [MePhosphonate-4O-mX]=4′-O-monomethylphosphonate-2′-O-methyl modified nucleotide, and [ademX-C16]=C16 Lipid attached to a nucleotide, [+X]=a Tm-increasing nucleotide, optionally an LNA.

[0625] In some embodiments, a lipid-conjugated RNAi oligonucleotide for reducing expression of a target gene comprises the modification pattern of

Sense Strand:
5'-[+X][mX][X][mX][mX][ademX-C16][mX][mX][mX]
[mX][mX][+X][mX][mX][mX][X][mX][mX][mX][mX][mX]
[fX][X][fX][fX][mX][mX][mX][mX][mX][mX][mXs][mXs]
[mX]-3'

### Hybridized to:

Antisense Strand:
5'-[MePhosphonate-4O-mXs][fXs][fXs][fX][fX][mX]
[fX][mX][mX][fX][mX][mX][mX][fX][mX][mX][mX][mX]
[mX][mXs][mXs][mX]-3'

[0626] wherein [mXs]=2′-O-methyl modified nucleotide with a phosphorothioate linkage to the neighboring nucleotide, [fXs]=2′-fluoro modified nucleotide with a phosphorothioate linkage to the neighboring nucleotide, [mX]=2′-O-methyl modified nucleotide with phosphodiester linkages to neighboring nucleotides, [fX]=2′-fluoro modified nucleotide with phosphodiester linkages to neighboring nucleotides, [MePhosphonate-4O-mX]=4′-O-monomethylphosphonate-2′-O-methyl modified nucleotide, [ademX-C16]=C16 Lipid attached to a nucleotide, [+X]=a Tm-increasing nucleotide, optionally an LNA.

[0627] In some embodiments, a lipid-conjugated RNAi oligonucleotide for reducing expression of a target gene comprises the modification pattern of

Sense Strand:
5′-[ademX-C16s][mX][mX][mX][mX][mX][mX][fX][fX]
[fX][fX][mX][mX][mX][mX][mXs][mXs][mX]-3′

### Hybridized to:

Antisense Strand:
5′-[MePhosphonate-4O-mXs][fXs][fXs][fX][fX]
[mX][fX][mX][mX][fX][mX][mX][mX][fX][mX][mX]
[mX][mX][mX][mXs][mXs][mX]-3′

[0628] wherein [mXs]=2′-O-methyl modified nucleotide with a phosphorothioate linkage to the neighboring nucleotide, [fXs]=2′-fluoro modified nucleotide with a phosphorothioate linkage to the neighboring nucleotide, [mX]=2′-O-methyl modified nucleotide with phosphodiester linkages to neighboring nucleotides, [fX]=2′-fluoro modified nucleotide with phosphodiester linkages to neighboring nucleotides, [MePhosphonate-4O-mX]=4′-O-monomethylphosphonate-2′-O-methyl modified nucleotide, [ademX-C16s]=C16 Lipid attached to a nucleotide with a phosphorothioate linkage to the neighboring nucleotide.

[0629] In some embodiments, a lipid-conjugated RNAi oligonucleotide for reducing expression of a target gene comprises the modification pattern of

Sense Strand:
5′-[ademX-C16s][mX][mX][mX][mX][mX][mX][fX][fX]
[fX][fX][mX][mX][mX][mXs][mXs][mX]-3′

### Hybridized to:

Antisense Strand:
5′-[MePhosphonate-4O-
mXs][fXs][fXs][fX][fX][mX][mX][mX][mX][fX][mX]
[mX][mX][fX][mX][mX][mX][mX][mX][mXs][mXs][mX]-3′

[0630] wherein [mXs]=2′-O-methyl modified nucleotide with a phosphorothioate linkage to the neighboring nucleotide, [fXs]=2′-fluoro modified nucleotide with a phosphorothioate linkage to the neighboring nucleotide, [mX]=2′-O-methyl modified nucleotide with phosphodiester linkages to neighboring nucleotides, [fX]=2′-fluoro modified nucleotide with phosphodiester linkages to neighboring nucleotides, [MePhosphonate-4O-mX]=4′-O-monomethylphosphonate-2′-O-methyl modified nucleotide, [ademX-C16s]=C16 Lipid attached to a nucleotide with a phosphorothioate linkage to the neighboring nucleotide.

[0631] In some embodiments, a lipid-conjugated RNAi oligonucleotide for reducing expression of a target gene comprises the modification pattern of

Sense Strand:
5′-[ademX-C16s][+X][mX][mX][mX][mX][mX][fX][fX]
[fX][fX][mX][mX][mXs][+Xs][+X]-3′

### Hybridized to:

Antisense Strand:
5′-[MePhosphonate-4O-
mXs][fXs][fXs][fX][fX][mX][fX][mX][mX][fX][mX]
[mX][mX][fX][mX][mX][mX][mX][mX][mXs][mXs][mX]-3′

[0632] wherein [mXs]=2′-O-methyl modified nucleotide with a phosphorothioate linkage to the neighboring nucleotide, [fXs]=2′-fluoro modified nucleotide with a phosphorothioate linkage to the neighboring nucleotide, [mX]=2′-O-methyl modified nucleotide with phosphodiester linkages to neighboring nucleotides, [fX]=2′-fluoro modified nucleotide with phosphodiester linkages to neighboring nucleotides, [MePhosphonate-4O-mX]=4′-O-monomethylphosphonate-2′-O-methyl modified nucleotide, [ademX-C16s]=C16 lipid attached to a nucleotide with a phosphorothioate linkage to the neighboring nucleotide, [+X]=a Tm-increasing nucleotide, optionally an LNA, and [+Xs]=a Tm-increasing nucleotide with a phosphorothioate linkage to the neighboring nucleotide, optionally an LNA or BNA.

[0633] In some embodiments, a lipid-conjugated RNAi oligonucleotide for reducing expression of a target gene comprises the modification pattern of

Sense Strand:
5′-[ademX-C22s][mX][mX][mX][mX][mX][fX][fX][fX]
[fX][mX][mX][mX][mX][mX][mXs][mXs][mX]-3′

### Hybridized to:

Antisense Strand:
5′-[MePhosphonate-4O-
mXs][fXs][fXs][fX][fX][mX][fX][mX][mX][fX][mX]
[mX][mX][fX][mX][mX][mX][mX][mX][mXs][mXs][mX]-3′

[0634] wherein [mXs]=2′-O-methyl modified nucleotide with a phosphorothioate linkage to the neighboring nucleotide, [fXs]=2′-fluoro modified nucleotide with a phosphorothioate linkage to the neighboring nucleotide, [mX]=2′-O-methyl modified nucleotide with phosphodiester linkages to neighboring nucleotides, [fX]=2′-fluoro modified nucleotide with phosphodiester linkages to neighboring nucleotides, [MePhosphonate-4O-mX]=4′-O-monomethylphosphonate-2′-O-methyl modified nucleotide, [ademX-C22s]=C22 Lipid attached to a nucleotide with a phosphorothioate linkage to the neighboring nucleotide.

[0635] In some embodiments, a lipid-conjugated RNAi oligonucleotide for reducing expression of a target gene comprises the modification pattern of

Sense Strand:
5′-[ademX-C22s][mX][mX][mX][mX][mX][mX][fX][fX]
[fX][fX][mX][mX][mX][mX][mX][mX][mX][mX][mX][mX]
[mX][mX][mX][mX][mX][mX][mX][mX][mX][mX][mX][mX]
[mX][mX][mX]-3′

### Hybridized to:

Antisense Strand:
5′-[MePhosphonate-4O-mXs][fXs][fXs][fX][fX][mX]
[mX][mX][mX][mX][mX][mX][mX][fX][mX][mX][mX][mX]
[mX][mXs][mXs][mX]-3′

[0636] wherein [mXs]=2′-O-methyl modified nucleotide with a phosphorothioate linkage to the neighboring nucleotide, [fXs]=2′-fluoro modified nucleotide with a phosphorothioate linkage to the neighboring nucleotide, [mX]=2′-O-methyl modified nucleotide with phosphodiester linkages to neighboring nucleotides, [fX]=2′-fluoro modified nucleotide with phosphodiester linkages to neighboring nucleotides, [MePhosphonate-4O-mX]=4′-O-monomethylphosphonate-2′-O-methyl modified nucleotide, [ademX-C22s]=C22 Lipid attached to a nucleotide with a phosphorothioate linkage to the neighboring nucleotide.

[0637] In some embodiments, a lipid-conjugated RNAi oligonucleotide for reducing expression of a target gene comprises the modification pattern of

Sense Strand:
5′-[+Xs][ademX-C22][fX]
[fX][fX][fX][mX][mX][mX][mX][+Xs][mXs][mX]-3′

### Hybridized to:

Antisense Strand:
5′-[MePhosphonate-4O-mXs][fXs][fXs][fX][fX][mX]
[mX][mX][mX][fX][mX][mX][mX][fX][mX][mX][mX][mX]
[mX][mXs][mXs][mX]-3′

[0638] wherein [mXs]=2′-O-methyl modified nucleotide with a phosphorothioate linkage to the neighboring nucleotide, [fXs]=2′-fluoro modified nucleotide with a phosphorothioate linkage to the neighboring nucleotide, [mX]=2′-O-methyl modified nucleotide with phosphodiester linkages to neighboring nucleotides, [fX]=2′-fluoro modified nucleotide with phosphodiester linkages to neighboring nucleotides, [MePhosphonate-4O-mX]=4′-O-monomethylphosphonate-2′-O-methyl modified nucleotide, [ademX-C22]=C22 Lipid attached to a nucleotide, [+X]=a Tm-increasing nucleotide, optionally an LNA, and [+Xs]=a Tm-increasing nucleotide with a phosphorothioate linkage to the neighboring nucleotide, optionally an LNA.

[0639] In some embodiments, a lipid-conjugated RNAi oligonucleotide for reducing expression of a target gene comprises the modification pattern of

Sense Strand:
5′-[+Xs][ademX-C22][fX]
[fX][fX][fX][mX][mX][mX][+X][+Xs][mXs][mX]-3′

### Hybridized to:

Antisense Strand:
5′-[MePhosphonate-4O0-mXs][fXs][fXs][fX][fX][mX]
[fX][mX][mX][fX][mX][mX][mX][fX][mX][mX][mX]
[MX][mX][mXs][mXs][mX]-3′

[0640] wherein [mXs]=2′-O-methyl modified nucleotide with a phosphorothioate linkage to the neighboring nucleotide, [fXs]=2′-fluoro modified nucleotide with a phosphorothioate linkage to the neighboring nucleotide, [mX]=2′-O-methyl modified nucleotide with phosphodiester linkages to neighboring nucleotides, [fX]=2′-fluoro modified nucleotide with phosphodiester linkages to neighboring nucleotides, [MePhosphonate-4O-mX]=4′-O-monomethylphosphonate-2′-O-methyl modified nucleotide, [ademX-C22]=C22 Lipid attached to a nucleotide, [+X]=a Tm-increasing nucleotide, optionally an LNA, and [+Xs]=a Tm-increasing nucleotide with a phosphorothioate linkage to the neighboring nucleotide, optionally an LNA.

[0641] In some embodiments, a lipid-conjugated RNAi oligonucleotide for reducing expression of a target gene comprises the modification pattern of

Sense Strand:
5′-[ademX-C22s][mX][mX][mX][mX][mX][mX][fX][fX]
[fX][fX][mX][mX][mX][mX][mX][mX][mXs][mXs][mX]-3′

### Hybridized to:

Antisense Strand:
5′ - [MePhosphonate-4O-mXs][fXs][fXs][fX][fX][mX]
[fX][mX][mX][fX][mX][mX][mX][fX][mX][mX][mX][mX]
[mX][mXs][mXs][mX]-3′

[0642] wherein [mXs]=2′-O-methyl modified nucleotide with a phosphorothioate linkage to the neighboring nucleotide, [fXs]=2′-fluoro modified nucleotide with a phosphorothioate linkage to the neighboring nucleotide, [mX]=2′-O-methyl modified nucleotide with phosphodiester linkages to neighboring nucleotides, [fX]=2′-fluoro modified nucleotide with phosphodiester linkages to neighboring nucleotides, [MePhosphonate-4O-mX]=4′-O-monomethylphosphonate-2′-O-methyl modified nucleotide, [ademX-C22s]=C22 Lipid attached to a nucleotide with a phosphorothioate linkage to the neighboring nucleotide.

[0643] In some embodiments, a lipid-conjugated RNAi oligonucleotide for reducing expression of a target gene comprises the modification pattern of

Sense Strand:
5′- [ademX-C22s][mX][mX][mX][mX][mX][mX][X][fX]
[fX][fX][mX][mX][mX][mX][mXs][mXs][mX]- 3′

### Hybridized to:

Antisense Strand:
5′ - [MePhosphonate-4O-mXs][fXs][fXs][fX][fX][mX]
[fX][mX][mX][fX][mX][mX][mX][fX][mX][mX][mX][mX]
[mX][mXs][mXs][mX]-3′

[0644] wherein [mXs]=2′-O-methyl modified nucleotide with a phosphorothioate linkage to the neighboring nucleotide, [fXs]=2′-fluoro modified nucleotide with a phosphorothioate linkage to the neighboring nucleotide, [mX]=2′-O-methyl modified nucleotide with phosphodiester linkages to neighboring nucleotides, [fX]=2′-fluoro modified nucleotide with phosphodiester linkages to neighboring nucleotides, [MePhosphonate-4O-mX]=4′-O-monomethylphosphonate-2′-O-methyl modified nucleotide, [ademX-C22s]=C22 Lipid attached to a nucleotide with a phosphorothioate linkage to the neighboring nucleotide.

[0645] In some embodiments, a lipid-conjugated RNAi oligonucleotide for reducing expression of a target gene comprises the modification pattern of

Sense Strand:
5′-[mX][mX][mX][X][fX][fX][fX][mX][mX][mX][mX][mX]
[mX][mX][mX][X][mX][mX][mX][mX][mX][mX][mX][ademX-
L][mX][mX][mX][mX][mX][mX][mX][mX]-3′

### Hybridized to:

Antisense Strand:
5′ - [MePhosphonate-4O-mXs][fXs][fXs][fX][fX][mX]
[fX][X][mX][fX][mX][mX][mX][fX][mX][mX/mXs][mX/
mXs][mX/mXs][mX/mXs][mXs][mXs][mX]-3′

[0646] wherein [mXs]=2′-O-methyl modified nucleotide with a phosphorothioate linkage to the neighboring nucleotide, [fXs]=2′-fluoro modified nucleotide with a phosphorothioate linkage to the neighboring nucleotide, [mX]=2′-O-methyl modified nucleotide with phosphodiester linkages to neighboring nucleotides, [fX]=2′-fluoro modified nucleotide with phosphodiester linkages to neighboring nucleotides, [MePhosphonate-4O-mX]=4′-O-monomethylphosphonate-2′-O-methyl modified nucleotide, [mX/mXs]=the position is either a 2′-O-methyl modified nucleotide with phosphodiester linkages to neighboring nucleotides or a 2′-O-methyl modified nucleotide with phosphorothioate linkages to neighboring nucleotides, and [ademX-L]=Lipid attached to a nucleotide.

[0647] In some embodiments, a lipid-conjugated RNAi oligonucleotide for reducing expression of a target gene comprises the modification pattern of

Sense Strand:
5′-[+Xs][fX][fX][fX][fX][X][mX][X][X][X][mX][mX]
[mX][mX][mX][mX][mX][mX][mX][mX][mX][ademX-L][mX]
[mX][mX][X][mX][mX][mX][mX]-3′

### Hybridized to:

Antisense Strand:
5′ - [MePhosphonate-4O-mXs][fXs][fXs][fX][fX][mX]
[fX][mX][mX][fX][mX][mX][mXs][fXs][mX/mXs][mX/mXs]
[mX/mXs][mX/mXs][mX/mXs][mXs][mXs][mX]-3′

[0648] wherein [mXs]=2′-O-methyl modified nucleotide with a phosphorothioate linkage to the neighboring nucleotide, [fXs]=2′-fluoro modified nucleotide with a phosphorothioate linkage to the neighboring nucleotide, [mX]=2′-O-methyl modified nucleotide with phosphodiester linkages to neighboring nucleotides, [fX]=2′-fluoro modified nucleotide with phosphodiester linkages to neighboring nucleotides, [MePhosphonate-4O-mX]=4′-O-monomethylphosphonate-2′-O-methyl modified nucleotide, [mX/mXs]=the position is either a 2′-O-methyl modified nucleotide with phosphodiester linkages to neighboring nucleotides or a 2′-O-methyl modified nucleotide with phosphorothioate linkages to neighboring nucleotides, and [ademX-L]=Lipid attached to a nucleotide.

[0649] In some embodiments, a lipid-conjugated RNAi oligonucleotide for reducing expression of a target gene comprises the modification pattern of

Sense Strand:
5′-[+Xs][fX][fX][X][mX][mX][mX][mX][mX][mX][mX]
[mX][mX][mX][mX][mX][mX][mX][mX][ademX-L][mX][mX]
[mX][mX][mX][mX][mX][mX]-3′

### Hybridized to:

Antisense Strand:
5′ - [MePhosphonate-4O-mXs][fXs][fXs][fX][fX][mX]
[X][mX][mX][fX][X][mX/mXs][mXs][fXs][mX/mXs][mX/
mXs][mX/mXs][mX/mXs][mX/mXs][mXs][mXs][mX]-3′

[0650] wherein [mXs]=2′-O-methyl modified nucleotide with a phosphorothioate linkage to the neighboring nucleotide, [fXs]=2′-fluoro modified nucleotide with a phosphorothioate linkage to the neighboring nucleotide, [mX]=2′-O-methyl modified nucleotide with phosphodiester linkages to neighboring nucleotides, [fX]=2′-fluoro modified nucleotide with phosphodiester linkages to neighboring nucleotides, [MePhosphonate-4O-mX]=4′-O-monomethylphosphonate-2′-O-methyl modified nucleotide, [mX/mXs]=the position is either a 2′-O-methyl modified nucleotide with phosphodiester linkages to neighboring nucleotides or a 2′-O-methyl modified nucleotide with phosphorothioate linkages to neighboring nucleotides, and [ademX-L]=Lipid attached to a nucleotide.

[0651] In some embodiments, a lipid-conjugated RNAi oligonucleotide for reducing expression of a target gene comprises the modification pattern of

Sense Strand:
5′- [ademXs-L][mX/+X][mX][mX][X][mX][mX][fX][fX]
[fX][fX][mX][mX][mX][mX/+X][mX/+X][mX][mXs/+Xs]
[mXs/+Xs][mX]-3′

### Hybridized to:

Antisense Strand:
5′ - [MePhosphonate-4O-mXs][fXs][fXs][fX][fX][mX]
[fX][mX][mX][fX][mX][X][X][fX][mX][mX][mX][mX][mX]
[mXs][mXs][mX] -3′

[0652] wherein [mXs]=2′-O-methyl modified nucleotide with a phosphorothioate linkage to the neighboring nucleotide, [fXs]=2′-fluoro modified nucleotide with a phosphorothioate linkage to the neighboring nucleotide, [mX]=2′-O-methyl modified nucleotide with phosphodiester linkages to neighboring nucleotides, [fX]=2′-fluoro modified nucleotide with phosphodiester linkages to neighboring nucleotides, [MePhosphonate-4O-mX]=4′-O-monomethylphosphonate-2′-O-methyl modified nucleotide, [mX/+X]=the position is either a 2′-O-methyl modified nucleotide with phosphodiester linkages to neighboring nucleotides or a Tₘ-increasing nucleotide with phosphodiester linkages to neighboring nucleotides, optionally an LNA, and [ademXs-C16]=Lipid attached to a nucleotide with a phosphorothioate linkage to the neighboring nucleotide.

[0653] In some embodiments, a lipid-conjugated RNAi oligonucleotide for reducing expression of a target gene comprises the modification pattern of

Sense Strand:
5′- [ademXs-L][fX/+X][fX][fX][fX][mX][mX][mX][mX/
+X][mX/+X][X][mXs/+Xs][mXs/+Xs][mX]-3′

### Hybridized to:

Antisense Strand:
5′ - [MePhosphonate-4O-mXs][fXs][fXs][fX][fX][mX]
[fX][mX][mX][fX][mX][mX][mXs][fXs][mX][mX][mX][mX]
[mX][mXs][mXs][mX] -3′

[0654] wherein [mXs]=2′-O-methyl modified nucleotide with a phosphorothioate linkage to the neighboring nucleotide, [fXs]=2′-fluoro modified nucleotide with a phosphorothioate linkage to the neighboring nucleotide, [mX]=2′-O-methyl modified nucleotide with phosphodiester linkages to neighboring nucleotides, [fX]=2′-fluoro modified nucleotide with phosphodiester linkages to neighboring nucleotides, [MePhosphonate-4O-mX]=4′-O-monomethylphosphonate-2′-O-methyl modified nucleotide, [mX/+X]=the position is either a 2′-O-methyl modified nucleotide with phosphodiester linkages to neighboring nucleotides or a Tm-increasing nucleotide, [mXs/+Xs]=the position is either a 2′-O-methyl modified nucleotide with a phosphorothioate linkage to the neighboring nucleotide or a Tm-increasing nucleotide with phosphorothioate linkage to neighboring nucleotide, optionally an LNA, [fXs/+Xs]=the position is either a 2′-fluoro modified nucleotide with a phosphorothioate linkage to the neighboring nucleotide or a Tm-increasing nucleotide with phosphorothioate linkage to neighboring nucleotide, optionally an LNA and [ademXs-L]=Lipid attached to a nucleotide with a phosphorothioate linkage to the neighboring nucleotide.

[0655] In some embodiments, a lipid-conjugated RNAi oligonucleotide for reducing expression of a target gene comprises the modification pattern of

Sense Strand:
5′- [ademXs-L][mX/+X][mX][fX][fX][fX][fX][mX][mX]
[mX][mX/+X][mX/+X][X][mXs/+Xs][mXs/+Xs][mX]-3′

### Hybridized to:

Antisense Strand:
5′ - [MePhosphonate-4O-mXs][fXs][fXs][fX][fX][mX]
[fX][mX][mX][fX][mX][mX][X][fX][mX][X][mX][X][mX]
[mXs][mXs][mX] -3′

[0656] wherein [mXs]=2′-O-methyl modified nucleotide with a phosphorothioate linkage to the neighboring nucleotide, [fXs]=2′-fluoro modified nucleotide with a phosphorothioate linkage to the neighboring nucleotide, [mX]=2′-O-methyl modified nucleotide with phosphodiester linkages to neighboring nucleotides, [fX]=2′-fluoro modified nucleotide with phosphodiester linkages to neighboring nucleotides, [MePhosphonate-4O-mX]=4′-O-monomethylphosphonate-2′-O-methyl modified nucleotide, [mX/+X]=the position is either a 2′-O-methyl modified nucleotide with phosphodiester linkages to neighboring nucleotides or a Tm-increasing nucleotide, [mXs/+Xs]=the position is either a 2′-O-methyl modified nucleotide with a phosphorothioate linkage to the neighboring nucleotide or a Tm-increasing nucleotide with phosphorothioate linkage to neighboring nucleotide, optionally an LNA, and [ademXs-L]=Lipid attached to a nucleotide with a phosphorothioate linkage to the neighboring nucleotide.

[0657] In some embodiments, a lipid-conjugated RNAi oligonucleotide for reducing expression of a target gene comprises the modification pattern of

Sense Strand:
5′- [ademXs-L][mX/+X][mX][fX][mX][mX][mX][mX/+X]
[mX/+X][mX][mXs/+Xs][mXs/+Xs][mX]-3′

### Hybridized to:

Antisense Strand:
5′ - [MePhosphonate-4O-mXs][fXs][fXs][fX][fX][X]
[fX][mX][mX][fX][X][mX][mXs][fXs][mX][mX][mX][mX]
[mX][mXs][mXs][mX] -3′

[0658] wherein [mXs]=2′-O-methyl modified nucleotide with a phosphorothioate linkage to the neighboring nucleotide, [fXs]=2′-fluoro modified nucleotide with a phosphorothioate linkage to the neighboring nucleotide, [mX]=2′-O-methyl modified nucleotide with phosphodiester linkages to neighboring nucleotides, [fX]=2′-fluoro modified nucleotide with phosphodiester linkages to neighboring nucleotides, [MePhosphonate-4O-mX]=4′-O-monomethylphosphonate-2′-O-methyl modified nucleotide, [mX/+X]=the position is either a 2′-O-methyl modified nucleotide with phosphodiester linkages to neighboring nucleotides or a Tm-increasing nucleotide, [mXs/+Xs]=the position is either a 2′-O-methyl modified nucleotide with a phosphorothioate linkage to the neighboring nucleotide or a Tm-increasing nucleotide with phosphorothioate linkage to neighboring nucleotide, optionally an LNA, [fXs/+Xs]=the position is either a 2′-fluoro modified nucleotide with a phosphorothioate linkage to the neighboring nucleotide or a Tm-increasing nucleotide with phosphorothioate linkage to neighboring nucleotide, optionally an LNA and [ademXs-L]=Lipid attached to a nucleotide with a phosphorothioate linkage to the neighboring nucleotide.

[0659] In some embodiments, a lipid-conjugated RNAi oligonucleotide for reducing expression of a target gene comprises the modification pattern of

Sense Strand:
5′- [+Xs][ademX-L][fX][fX][fX][fX][mX][mX][mX][mX]
[+Xs][mXs][mX]-3′

### Hybridized to:

Antisense Strand:
5′ - [MePhosphonate-4O-mXs][fXs][fXs][fX][fX][mX]
[fX][mX][mX][fX][mX][mX][X][fX][mX][X][mX][mX][mX]
[mXs][mXs][mX] -3′

[0660] wherein [mXs]=2′-O-methyl modified nucleotide with a phosphorothioate linkage to the neighboring nucleotide, [fXs]=2′-fluoro modified nucleotide with a phosphorothioate linkage to the neighboring nucleotide, [mX]=2′-O-methyl modified nucleotide with phosphodiester linkages to neighboring nucleotides, [fX]=2′-fluoro modified nucleotide with phosphodiester linkages to neighboring nucleotides, [MePhosphonate-4O-mX]=4′-O-monomethylphosphonate-2′-O-methyl modified nucleotide, [+X]=a Tm-increasing nucleotide, [+Xs]=a Tm-increasing nucleotide with a phosphorothioate linkage to the neighboring nucleotide, and [ademXs-L]=Lipid attached to a nucleotide with a phosphorothioate linkage to the neighboring nucleotide, wherein the antisense strand comprises a 5′ overhang of 2 nucleotides and a 3′ overhang of 7 nucleotides.

[0661] In some embodiments, a lipid-conjugated RNAi oligonucleotide for reducing expression of a target gene comprises the modification pattern of

Sense Strand:
5′- [+Xs][ademX-L][fX][fX][fX][fX][X][mX][mX][+X]
[+Xs][mXs][mX]-3′

### Hybridized to:

Antisense Strand:
5′ - [MePhosphonate-4O-mXs][fXs][fXs][fX][fX][mX]
[fX][mX][mX][fX][mX][mX][mX][fX][mX][mX][mX][mX]
[mX][mXs][mXs][mX] -3′

[0662] wherein [mXs]=2′-O-methyl modified nucleotide with a phosphorothioate linkage to the neighboring nucleotide, [fXs]=2′-fluoro modified nucleotide with a phosphorothioate linkage to the neighboring nucleotide, [mX]=2′-O-methyl modified nucleotide with phosphodiester linkages to neighboring nucleotides, [fX]=2′-fluoro modified nucleotide with phosphodiester linkages to neighboring nucleotides, [MePhosphonate-4O-mX]=4′-O-monomethylphosphonate-2′-O-methyl modified nucleotide, [+X]=a Tm-increasing nucleotide, [+Xs]=a Tm-increasing nucleotide with a phosphorothioate linkage to the neighboring nucleotide, and [ademXs-L]=Lipid attached to a nucleotide with a phosphorothioate linkage to the neighboring nucleotide, wherein the antisense strand comprises a 5′ overhang of 2 nucleotides and a 3′ overhang of 7 nucleotides.

[0663] In some embodiments, a lipid-conjugated RNAi oligonucleotide for reducing expression of a target gene comprises the modification pattern of

Sense Strand:
5′- [ademXs-L][+X][fX][X][fX][mX][mX][mX][+X][+Xs]
[mXs][mX]-3′

### Hybridized to:

Antisense Strand:
5′ - [MePhosphonate-4O-mXs][fXs][fXs][fX][fX][mX]
[fX][mX][mX][fX][mX][mX][mXs][fXs][mX][mX][mX][mX]
[mX][mXs][mXs][mX] -3′

[0664] wherein [mXs]=2′-O-methyl modified nucleotide with a phosphorothioate linkage to the neighboring nucleotide, [fXs]=2′-fluoro modified nucleotide with a phosphorothioate linkage to the neighboring nucleotide, [mX]=2′-O-methyl modified nucleotide with phosphodiester linkages to neighboring nucleotides, [fX]=2′-fluoro modified nucleotide with phosphodiester linkages to neighboring nucleotides, [MePhosphonate-4O-mX]=4′-O-monomethylphosphonate-2′-O-methyl modified nucleotide, [+X]=a Tm-increasing nucleotide, [+Xs]=a Tm-increasing nucleotide with a phosphorothioate linkage to the neighboring nucleotide, and [ademXs-L]=Lipid attached to a nucleotide with a phosphorothioate linkage to the neighboring nucleotide, wherein the antisense strand comprises a 5′ overhang of 2 nucleotides and a 3′ overhang of 8 nucleotides.

[0665] In some embodiments, a lipid-conjugated RNAi oligonucleotide for reducing expression of a target gene comprises the modification pattern of

Sense Strand:
5′- [ademXs-L][+X][fX][fX][fX][fX][mX][mX][mX]
[+Xs][+Xs][mX]-3′

### Hybridized to:

Antisense Strand:
5′ - [MePhosphonate-4O-mXs][fXs][fXs][fX][fX][mX]
[fX][X][mX][fX][mX][mX][mXs][fXs][mX][mX][mX][mX]
[mX][mXs][mXs][mX] -3′

[0666] wherein [mXs]=2′-O-methyl modified nucleotide with a phosphorothioate linkage to the neighboring nucleotide, [fXs]=2′-fluoro modified nucleotide with a phosphorothioate linkage to the neighboring nucleotide, [mX]=2′-O-methyl modified nucleotide with phosphodiester linkages to neighboring nucleotides, [fX]=2′-fluoro modified nucleotide with phosphodiester linkages to neighboring nucleotides, [MePhosphonate-4O-mX]=4′-O-monomethylphosphonate-2′-O-methyl modified nucleotide, [+X]=a Tm-increasing nucleotide, [+Xs]=a Tm-increasing nucleotide with a phosphorothioate linkage to the neighboring nucleotide, and [ademXs-L]=Lipid attached to a nucleotide with a phosphorothioate linkage to the neighboring nucleotide, wherein the antisense strand comprises a 5′ overhang of 3 nucleotides and a 3′ overhang of 7 nucleotides.

[0667] In some embodiments, a lipid-conjugated RNAi oligonucleotide for reducing expression of a target gene comprises the modification pattern of

Sense Strand:
5′- [ademXs-L][+X][mX][mX][mX][+X][+X][mXs][mXs]
[mX]-3′

### Hybridized to:

Antisense Strand:
5′ - [MePhosphonate-4O-mXs][fXs][fXs][fX][fX][mX]
[fX][mX][mX][fX][mX][mX][mXs][fXs][mX][mX][mX][mX]
[mX][mXs][mXs][mX] -3′

[0668] wherein [mXs]=2′-O-methyl modified nucleotide with a phosphorothioate linkage to the neighboring nucleotide, [fXs]=2′-fluoro modified nucleotide with a phosphorothioate linkage to the neighboring nucleotide, [mX]=2′-O-methyl modified nucleotide with phosphodiester linkages to neighboring nucleotides, [fX]=2′-fluoro modified nucleotide with phosphodiester linkages to neighboring nucleotides, [MePhosphonate-4O-mX]=4′-O-monomethylphosphonate-2′-O-methyl modified nucleotide, [+X]=Tm-increasing nucleotide, and [ademXs-L]=Lipid attached to a nucleotide with a phosphorothioate linkage to the neighboring nucleotide, wherein the antisense strand comprises a 5′ overhang of 1 nucleotide and a 3′ overhang of 11 nucleotides.

[0669] In some embodiments, a lipid-conjugated RNAi oligonucleotide for reducing expression of a target gene comprises the modification pattern as set forth in any one of Compounds 2-14 as described herein. In some embodiments, a lipid-conjugated RNAi oligonucleotide for reducing expression of a target gene comprises the modification pattern as set forth in Compound 15 as described herein. In some embodiments, a lipid-conjugated RNAi oligonucleotide for reducing expression of a target gene comprises the modification pattern as set forth in any one of Compounds 16-18 as described herein. In some embodiments, a lipid-conjugated RNAi oligonucleotide for reducing expression of a target gene comprises the modification pattern as set forth in any one of Compounds 19-38 as described herein. In some embodiments, a lipid-conjugated RNAi oligonucleotide for reducing expression of a target gene comprises the modification pattern as set forth in any one of Compounds 39-40, 45, and 48-49 as described herein. In some embodiments, a lipid-conjugated RNAi oligonucleotide for reducing expression of a target gene comprises the modification pattern as set forth in any one of Compounds 41-44 as described herein. In some embodiments, a lipid-conjugated RNAi oligonucleotide for reducing expression of a target gene comprises the modification pattern as set forth in any one of Compounds 46-47 as described herein. In some embodiments, a lipid-conjugated RNAi oligonucleotide for reducing expression of a target gene comprises the modification pattern as set forth in any one of Compounds 57 and 98-108 as described herein. In some embodiments, a lipid-conjugated RNAi oligonucleotide for reducing expression of a target gene comprises the modification pattern as set forth in any one of Compounds 120-122 as described herein. In some embodiments, a lipid-conjugated RNAi oligonucleotide for reducing expression of a target gene comprises the modification pattern as set forth in any one of Compounds 59-64 as described herein. In some embodiments, a lipid-conjugated RNAi oligonucleotide for reducing expression of a target gene comprises the modification pattern as set forth in any one of Compounds 65-69 as described herein. In some embodiments, a lipid-conjugated RNAi oligonucleotide for reducing expression of a target gene comprises the modification pattern as set forth in any one of Compounds 70-71 as described herein. In some embodiments, a lipid-conjugated RNAi oligonucleotide for reducing expression of a target gene comprises the modification pattern as set forth in any one of Compounds 72-74 as described herein. In some embodiments, a lipid-conjugated RNAi oligonucleotide for reducing expression of a target gene comprises the modification pattern as set forth in any one of Compounds 75-76 as described herein. In some embodiments, a lipid-conjugated RNAi oligonucleotide for reducing expression of a target gene comprises the modification pattern as set forth in any one of Compounds 77-79 as described herein. In some embodiments, a lipid-conjugated RNAi oligonucleotide for reducing expression of a target gene comprises the modification pattern as set forth in Compound 58 as described herein. In some embodiments, a lipid-conjugated RNAi oligonucleotide for reducing expression of a target gene comprises the modification pattern as set forth in any one of Compounds 80-81 as described herein. In some embodiments, a lipid-conjugated RNAi oligonucleotide for reducing expression of a target gene comprises the modification pattern as set forth in any one of Compounds 82-84 as described herein. In some embodiments, a lipid-conjugated RNAi oligonucleotide for reducing expression of a target gene comprises the modification pattern as set forth in any one of Compounds 85-86 as described herein. In some embodiments, a lipid-conjugated RNAi oligonucleotide for reducing expression of a target gene comprises the modification pattern as set forth in any one of Compounds 87-89 as described herein. In some embodiments, a lipid-conjugated RNAi oligonucleotide for reducing expression of a target gene comprises the modification pattern as set forth in any one of Compounds 90-91 as described herein. In some embodiments, a lipid-conjugated RNAi oligonucleotide for reducing expression of a target gene comprises the modification pattern as set forth in any one of Compounds 92-94 as described herein. In some embodiments, a lipid-conjugated RNAi oligonucleotide for reducing expression of a target gene comprises the modification pattern as set forth in Compound 95 as described herein. In some embodiments, a lipid-conjugated RNAi oligonucleotide for reducing expression of a target gene comprises the modification pattern as set forth in any one of Compounds 96-97 as described herein. In some embodiments, a lipid-conjugated RNAi oligonucleotide for reducing expression of a target gene comprises the modification pattern as set forth in any one of Compounds 109-117 as described herein. In some embodiments, a lipid-conjugated RNAi oligonucleotide for reducing expression of a target gene comprises the modification pattern as set forth in any one of Compounds 123-126 as described herein. In some embodiments, a lipid-conjugated RNAi oligonucleotide for reducing expression of a target gene comprises the modification pattern as set forth in any one of 127-130 as described herein. In some embodiments, a lipid-conjugated RNAi oligonucleotide for reducing expression of a target gene comprises the modification pattern as set forth in any one of Compounds 131-136 as described herein. In some embodiments, a lipid-conjugated RNAi oligonucleotide for reducing expression of a target gene comprises the modification pattern as set forth in any one of Compounds 137-140 as described herein. In some embodiments, a lipid-conjugated RNAi oligonucleotide for reducing expression of a target gene comprises the modification pattern as set forth in any one of Compounds 141-145 as described herein. In some embodiments, a lipid-conjugated RNAi oligonucleotide for reducing expression of a target gene comprises the modification pattern as set forth in any one of Compounds 146-148 as described herein. In some embodiments, a lipid-conjugated RNAi oligonucleotide for reducing expression of a target gene comprises the modification pattern as set forth in any one of Compounds 149-154 as described herein. In some embodiments, a lipid-conjugated RNAi oligonucleotide for reducing expression of a target gene comprises the modification pattern as set forth in any one of Compounds 155-160 as described herein. In some embodiments, a lipid-conjugated RNAi oligonucleotide for reducing expression of a target gene comprises the modification pattern as set forth in Compound 161 as described herein. In some embodiments, a lipid-conjugated RNAi oligonucleotide for reducing expression of a target gene comprises the modification pattern as set forth in any one of Compounds 162-165 and 171 as described herein. In some embodiments, a lipid-conjugated RNAi oligonucleotide for reducing expression of a target gene comprises the modification pattern as set forth in any one of Compounds 166-170 as described herein. In some embodiments, a lipid-conjugated RNAi oligonucleotide for reducing expression of a target gene comprises the modification pattern as set forth in Compound 172 as described herein. In some embodiments, a lipid-conjugated RNAi oligonucleotide for reducing expression of a target gene comprises the modification pattern as set forth in any one of Compounds 173-176 and 182 as described herein. In some embodiments, a lipid-conjugated RNAi oligonucleotide for reducing expression of a target gene comprises the modification pattern as set forth in any one of Compounds 177-181 as described herein. In some embodiments, a lipid-conjugated RNAi oligonucleotide for reducing expression of a target gene comprises the modification pattern as set forth in any one of 183-190 as described herein. In some embodiments, a lipid-conjugated RNAi oligonucleotide for reducing expression of a target gene comprises the modification pattern as set forth in any one of Compounds 191-194 as described herein. In some embodiments, a lipid-conjugated RNAi oligonucleotide for reducing expression of a target gene comprises the modification pattern as set forth in any one of Compounds 195-197 as described herein. In some embodiments, a lipid-conjugated RNAi oligonucleotide for reducing expression of a target gene comprises the modification pattern as set forth in any one of Compounds 200-201 as described herein. In some embodiments, a lipid-conjugated RNAi oligonucleotide for reducing expression of a target gene comprises the modification pattern as set forth in any one of Compounds 202-205, 207-210, and 211-215 as described herein. In some embodiments, a lipid-conjugated RNAi oligonucleotide for reducing expression of a target gene comprises the modification pattern as set forth in any one of Compounds 217-218 as described herein. In some embodiments, a lipid-conjugated RNAi oligonucleotide for reducing expression of a target gene comprises the modification pattern as set forth in any one of Compounds 219-222 and 224-232 as described herein. In some embodiments, a lipid-conjugated RNAi oligonucleotide for reducing expression of a target gene comprises the modification pattern as set forth in any one of 277-278 as described herein. In some embodiments, a lipid-conjugated RNAi oligonucleotide for reducing expression of a target gene comprises the modification pattern as set forth in any one of Compounds 279-285 as described herein. In some embodiments, a lipid-conjugated RNAi oligonucleotide for reducing expression of a target gene comprises the modification pattern as set forth in any one of Compounds 198-199 and 233 as described herein. In some embodiments, a lipid-conjugated RNAi oligonucleotide for reducing expression of a target gene comprises the modification pattern as set forth in any one of Compounds 234-236 as described herein. In some embodiments, a lipid-conjugated RNAi oligonucleotide for reducing expression of a target gene comprises the modification pattern as set forth in any one of Compounds 237-239 as described herein. In some embodiments, a lipid-conjugated RNAi oligonucleotide for reducing expression of a target gene comprises the modification pattern as set forth in any one of Compounds 240-242 as described herein. In some embodiments, a lipid-conjugated RNAi oligonucleotide for reducing expression of a target gene comprises the modification pattern as set forth in any one of Compounds 243-245 as described herein. In some embodiments, a lipid-conjugated RNAi oligonucleotide for reducing expression of a target gene comprises the modification pattern as set forth in any one of Compounds 246-251 as described herein. In some embodiments, a lipid-conjugated RNAi oligonucleotide for reducing expression of a target gene comprises the modification pattern as set forth in any one of Compounds 252-255 as described herein. In some embodiments, a lipid-conjugated RNAi oligonucleotide for reducing expression of a target gene comprises the modification pattern as set forth in Compound 256 as described herein. In some embodiments, a lipid-conjugated RNAi oligonucleotide for reducing expression of a target gene comprises the modification pattern as set forth in any one of Compounds 257-259 as described herein. In some embodiments, a lipid-conjugated RNAi oligonucleotide for reducing expression of a target gene comprises the modification pattern as set forth in any one of Compounds 260-262 as described herein. In some embodiments, a lipid-conjugated RNAi oligonucleotide for reducing expression of a target gene comprises the modification pattern as set forth in any one of Compounds 152 and 264-265 as described herein. In some embodiments, a lipid-conjugated RNAi oligonucleotide for reducing expression of a target gene comprises the modification pattern as set forth in any one of Compounds 266-268 as described herein. In some embodiments, a lipid-conjugated RNAi oligonucleotide for reducing expression of a target gene comprises the modification pattern as set forth in any one of Compounds 269-272 as described herein. In some embodiments, a lipid-conjugated RNAi oligonucleotide for reducing expression of a target gene comprises the modification pattern as set forth in any one of Compounds 273-276 as described herein. In some embodiments, a lipid-conjugated RNAi oligonucleotide for reducing expression of a target gene comprises the modification pattern as set forth in any one of Compounds 286 and 292 as described herein. In some embodiments, a lipid-conjugated RNAi oligonucleotide for reducing expression of a target gene comprises the modification pattern as set forth in any one of Compounds 287-291 as described herein. In some embodiments, a lipid-conjugated RNAi oligonucleotide for reducing expression of a target gene comprises the modification pattern as set forth in any one of Compounds 293-294 as described herein. In some embodiments, a lipid-conjugated RNAi oligonucleotide for reducing expression of a target gene comprises the modification pattern as set forth in any one of Compounds 2-15, 46 and 47 as described herein. In some embodiments, a lipid-conjugated RNAi oligonucleotide for reducing expression of a target gene comprises the modification pattern as set forth in any one of Compounds 137-140. 146, 148, 162-165, 173-176, 183-190, 200, 217, 247, 270, 277, 278, 286 and 292 as described herein. In some embodiments, a lipid-conjugated RNAi oligonucleotide for reducing expression of a target gene comprises the modification pattern as set forth in any one of Compounds 16, 19-28, 30-38, 41-44, 65-79, 80-97, 127-130, 202-205, 207-210, 212-215, 219-221, 224-227, 229-232, 237-239, 243-245, 252-255, 260-262, 266-268, 274-276, 280-285, 287-291, and 293-294 as described herein. In some embodiments, a lipid-conjugated RNAi oligonucleotide for reducing expression of a target gene comprises the modification pattern as set forth in any one of Compounds 40, 45, 49, 59-64, 98, 99-117, 131-136, 141-145, 149-160, 166-170, 177-181, 191-197, 201, 211, 218, 228, 234-236, 240-242, 248-251, 257-259, 264, 265, 272-273, and 279 as described herein. In some or any of the foregoing embodiments, reference to Compound numbers refers to the modification pattern (e.g., phosphorothioate linkages, 2′ modifications, conjugation) and not the nucleotide sequences.

### General Methods of Providing the Nucleic Acids and Analogues Thereof

[0670] The nucleic acids and analogues thereof comprising lipid conjugate described herein can be made using a variety of synthetic methods known in the art, including standard phosphoramidite methods. Any phosphoramidite synthesis method can be used to synthesize the provided nucleic acids of this disclosure. In certain embodiments, phosphoramidites are used in a solid phase synthesis method to yield reactive intermediate phosphite compounds, which are subsequently oxidized using known methods to produce phosphonate-modified oligonucleotides, typically with a phosphodiester or phosphorothioate internucleotide linkages. The oligonucleotide synthesis of the present disclosure can be performed in either direction: from 5′ to 3′ or from 3′ to 5′ using art known methods.

[0671] In certain embodiments, the method for synthesizing a provided nucleic acid comprises (a) attaching a nucleoside or analogue thereof to a solid support via a covalent linkage; (b) coupling a nucleoside phosphoramidite or analogue thereof to a reactive hydroxyl group on the nucleoside or analogue thereof of step (a) to form an internucleotide bond there between, wherein any uncoupled nucleoside or analogue thereof on the solid support is capped with a capping reagent; (c) oxidizing said internucleotide bond with an oxidizing agent; and (d) repeating steps (b) to (c) iteratively with subsequent nucleoside phosphoramidites or analogue thereof to form a nucleic acid or analogue thereof, wherein at least the nucleoside or analogue thereof of step (a), the nucleoside phosphoramidite or analogue thereof of step (b) or at least one of the subsequent nucleoside phosphoramidites or analogues thereof of step (d) comprises a lipid conjugate moiety as described herein. Typically, the coupling, capping/oxidizing steps and optionally, the deprotecting steps, are repeated until the oligonucleotide reaches the desired length and/or sequence, after which it is cleaved from the solid support. In certain embodiments, an oligonucleotide is prepared comprising 1-3 nucleic acid or analogues thereof comprising lipid conjugates units on a tetraloop.

[0672] In Scheme A below, where a particular protecting group, leaving group, or transformation condition is depicted, one of ordinary skill in the art will appreciate that other protecting groups, leaving groups, and transformation conditions are also suitable and are contemplated. Certain reactive functional groups (e.g., —N(H)—, —OH, etc.) envisioned in the genera in Scheme A requiring additional protection group strategies are also contemplated and is appreciated by those having ordinary skill in the art. Such groups and transformations are described in detail in MARCH'S ADVANCED ORGANIC CHEMISTRY: REACTIONS, MECHANISMS, AND STRUCTURE, M. B. Smith and J. March, 5^{th} Edition, John Wiley & Sons, 2001, COMPREHENSIVE ORGANIC TRANSFORMATIONS, (R. C. Larock, 2^{nd} Edition, John Wiley & Sons, 1999), and PROTECTING GROUPS IN ORGANIC SYNTHESIS, (T. W. Greene and P. G. M. Wuts, 3^{rd} edition, John Wiley & Sons, 1999), the entirety of each of which is hereby incorporated herein by reference.

[0673] In certain embodiments, nucleic acids, and analogues thereof of the present disclosure are generally prepared according to Scheme A, Scheme A1 and Scheme B set forth below:

[chemical structure]

[chemical structure]

[0674] As depicted in Scheme A and Scheme A1 above, a nucleic acid or analogue thereof of formula I-1 is conjugated with one or more ligand/lipophilic compound to form a compound of formula I or Ia comprising one more ligand/lipid conjugates. Typically, conjugation is performed through an esterification or amidation reaction between a nucleic acid or analogue thereof of formula I-1 or I-1a and one or more adamantyl and/or lipophilic compound (e.g., fatty acid) in series or in parallel by known techniques in the art. Nucleic acid or analogue thereof of formula I or Ia can then be deprotected to form a compound of formula I-2 or I-2a and protected with a suitable hydroxyl protecting group (e.g., DMTr) to form a compound of formula I-3 or I-3a. In one aspect, nucleic acid-ligand conjugates of formula I-3 or I-3a can be covalently attached to a solid support (e.g., through a succinic acid linking group) to form a solid support nucleic acid-ligand conjugate or analogue thereof of formula I-4 or I-4a comprising one or more adamantyl and/or lipid conjugate. In another aspect, a nucleic acid-ligand conjugates of formula 1-3 or I-3a can react with a P(III) forming reagent (e.g., 2-cyanoethyl N,N-di-isopropylchlorophosphoramidite) to form a nucleic acid or analogue thereof of formula I-5 or I-5a comprising a P(III) group. A nucleic acid-ligand conjugate or analogue thereof of formula I-5 or I-5a can then be subjected to oligomerization forming conditions preformed using known and commonly applied processes to prepare oligonucleotides in the art. For example, the compound of formula I-5 or I-5a is coupled to a solid supported nucleic acid-ligand conjugate or analogue thereof bearing a 5′-hydroxyl group. Further steps can comprise one or more deprotections, couplings, phosphite oxidation, and/or cleavage from the solid support to provide an oligonucleotide of various nucleotide lengths, including one or more lipid conjugate nucleotide units represented by a compound of formula II-1 or II-Ia. Each of B, E, L, ligand, LC, n, PG¹, PG², PG⁴, R¹, R², R³, X, X¹, X², X³, and Z is as defined above and described herein.

[chemical structure]

[0675] As depicted in Scheme B above, a nucleic acid or analogue thereof of formula I-1 can be deprotected to form a compound of formula I-6, protected with a suitable hydroxyl protecting group (e.g., DMTr) to form a compound of formula I-7, and reacted with a P(III) forming reagent (e.g., 2-cyanoethyl N,N-di-isopropylchlorophosphoramidite) to form a nucleic acid or analogue thereof of formula 1-8 comprising a P(III) group. Next, a nucleic acid or analogue thereof of formula I-8 is subjected to oligomerization forming conditions preformed using known and commonly applied processes to prepare oligonucleotides in the art. For example, the compound of formula I-8 is coupled to a solid supported nucleic acid or analogue thereof bearing a 5′-hydroxyl group. Further steps can comprise one or more deprotections, couplings, phosphite oxidation, and/or cleavage from the solid support to provide an oligonucleotide of various nucleotide lengths represented by a compound of formula II-2. An oligonucleotide of formula II-2 can then be conjugated with one or more ligands e.g., adamantyl, or lipophilic compound (e.g., fatty acid) to form a compound of formula II-1 comprising one or more ligand conjugates. Typically, conjugation is performed through an esterification or amidation reaction between a nucleic acid or analogue thereof of formula II-2 and one or more adamantyl or fatty acid in series or in parallel by known techniques in the art. Each of B, E, L, ligand, LC, n, PG¹, PG², PG⁴, R¹, R², R³, X, X¹, X², X³, and Z is as defined above and described herein.

[0676] In certain embodiments, nucleic acids, and analogues thereof of the present disclosure are prepared according to Scheme C and Scheme D set forth below:

[chemical structure]

[0677] As depicted in Scheme C above, a nucleic acid or analogue thereof of formula C1 is protected to form a compound of formula C2. Nucleic acid or analogue thereof of formula C2 is then alkylated (e.g., using DMSO and acetic acid via the Pummerer rearrangement) to form a monothioacetal compound of formula C3. Next, nucleic acid or analogue thereof of formula C3 is coupled with C4 under appropriate conditions (e.g., mild oxidizing conditions) to form a nucleic acid or analogue thereof of formula C5. Nucleic acid or analogue thereof of formula C5 can then be deprotected to form a compound of formula C6 and coupled with a ligand (adamantyl or lipophilic compound (e.g., a fatty acid)) of formula C7 under appropriate amide forming conditions (e.g., HATU, DIPEA), to form a nucleic acid-ligand conjugate or analogue thereof of formula I-b comprising a lipid conjugate of the disclosure. Nucleic acid-ligand conjugate or analogue thereof of formula I-b can then be deprotected to form a compound of formula C8 and protected with a suitable hydroxyl protecting group (e.g., DMTr) to form a compound of formula C9. In one aspect, nucleic acid, or analogue thereof of formula C9 can be covalently attached to a solid support (e.g., through a succinic acid linking group) to form a solid support nucleic acid-ligand conjugate or analogue thereof of formula C10 comprising a ligand conjugate (adamantyl or lipid moiety) of the disclosure. In another aspect, a nucleic acid-ligand conjugate or analogue thereof of formula C9 can reacted with a P(III) forming reagent (e.g., 2-cyanoethyl N,N-di-isopropylchlorophosphoramidite) to form a nucleic acid-ligand conjugate or analogue thereof of formula C11 comprising a P(III) group. A nucleic acid-ligand conjugate or analogue thereof of formula C11 can then be subjected to oligomerization forming conditions preformed using known and commonly applied processes to prepare oligonucleotides in the art. For example, the compound of formula C11 is coupled to a solid supported nucleic acid-ligand conjugate or analogue thereof bearing a 5′-hydroxyl group. Further steps can comprise one or more deprotections, couplings, phosphite oxidation, and/or cleavage from the solid support to provide an oligonucleotide of various nucleotide lengths, including one or more adamantyl and/or lipid conjugate nucleotide units represented by a compound of formula II-b-3. Each of B, E, L², PG¹, PG², PG³, PG⁴, R¹, R², R³, R⁴, R⁵, X¹, X², X³, V, W, and Z is as defined above and described herein.

[chemical structure]

[chemical structure]

[0678] Each of B, E, L², PG¹, PG², PG³, PG⁴, R¹, R², R³, R⁴, R⁵, X¹, X², X³, V, W, and Z is as defined above and described herein. As depicted in Scheme D above, a nucleic acid or analogue thereof of formula C5 can be selectively deprotected to form a compound of formula D1, protected with a suitable hydroxyl protecting group (e.g., DMTr) to form a compound of formula D2, and reacted with a P(III) forming reagent (e.g., 2-cyanoethyl N,N-di-isopropylchlorophosphoramidite) to form a nucleic acid or analogue thereof of formula D3. Next, a nucleic acid or analogue thereof of formula D3 is subjected to oligomerization forming conditions preformed using known and commonly applied processes to prepare oligonucleotides in the art. For example, the compound of formula D3 is coupled to a solid supported nucleic acid or analogue thereof bearing a 5′-hydroxyl group. Further steps can comprise one or more deprotections, couplings, phosphite oxidation, and/or cleavage from the solid support to provide an oligonucleotide of various nucleotide lengths, represented by a compound of formula D4. An oligonucleotide of formula D4 can then be deprotected to form a compound of formula D5 and coupled with a hydrophobic ligand (e.g., adamantyl or a lipophilic moiety) to form a compound of formula C7 (e.g., adamantyl or a fatty acid) under appropriate amide forming conditions (e.g., HATU, DIPEA), to form an oligonucleotide of formula II-b-3 comprising a ligand (e.g., adamantyl or a fatty acid) conjugate of the disclosure.

[0679] One of skill in the art will appreciate that various functional groups present in the nucleic acid or analogues thereof of the disclosure such as aliphatic groups, alcohols, carboxylic acids, esters, amides, aldehydes, halogens, and nitriles can be interconverted by techniques well known in the art including, but not limited to reduction, oxidation, esterification, hydrolysis, partial oxidation, partial reduction, halogenation, dehydration, partial hydration, and hydration. See for example, “MARCH'S ADVANCED ORGANIC CHEMISTRY”, (5^{th} Ed., Ed.: Smith, M. B. and March, J., John Wiley & Sons, New York: 2001), the entirety of each of which is herein incorporated by reference. Such interconversions may require one or more of the aforementioned techniques, and certain methods for synthesizing the provided nucleic acids of the disclosure are described below in the Exemplification.

[0680] In some embodiments, the present disclosure provides a method for preparing an oligonucleotide comprising one or more lipid conjugate, said lipid conjugate unit represent by formula II-a-1:

[chemical structure]

[0681] or a pharmaceutically acceptable salt thereof, comprising the steps of:
[0682] (a) providing a nucleic acid or analogue thereof of formula I-5a:

[chemical structure]

[0683] or salt thereof, and
[0684] (b) oligomerizing said compound of formula I-5a to form a compound of formula II-1a, wherein each of B, E, L, LC, n, PG⁴, R¹, R², R³, X, X¹, X², X³, E, and Z is as defined above and described herein.

[0685] In step (b) above, oligomerizing refers to preforming oligomerization forming conditions using known and commonly applied processes to prepare oligonucleotides in the art. For example, the compound of formula I-5a is coupled to a solid supported nucleic acid or analogue thereof bearing a 5′-hydroxyl group. Further steps can comprise one or more deprotections, couplings, phosphite oxidation, and cleavage from the solid support to provide an oligonucleotide of various nucleotide lengths, represented by a compound of formula II-1a comprising a lipid conjugate of the disclosure.

[0686] In some embodiments, the present disclosure provides a method for preparing an oligonucleotide comprising one or more lipid conjugate, further comprising preparing a nucleic acid or analogue thereof of formula I-5a:

[chemical structure]

[0687] or a salt thereof, comprising the steps of:
[0688] (a) providing a nucleic acid or analogue thereof of formula Ia:

[chemical structure]

[0689] or salt thereof,
[0690] (b) deprotecting said nucleic acid or analogue thereof of formula Ia to form a compound of formula I-2a:

[chemical structure]

[0691] or salt thereof,
[0692] (c) protecting said nucleic acid or analogue thereof of formula I-2 to form a compound of formula I-3a:

[chemical structure]

[0693] or salt thereof, and
[0694] (d) treating said nucleic acid or analogue thereof of formula I-3a with a P(III) forming reagent to form a nucleic acid or analogue thereof of formula I-5a, wherein each of B, E, L, LC, n, PG⁴, R¹, R², R³, X, X¹, X², X³, E, and Z is as defined above and described herein.

[0695] In step (b) above, PG¹ and PG² of a compound of formula Ia comprise silyl ethers or cyclic silylene derivatives that can be removed under acidic conditions or with fluoride anion. Examples of reagents providing fluoride anion for the removal of silicon-based protecting groups include hydrofluoric acid, hydrogen fluoride pyridine, triethylamine trihydrofluoride, tetra-N-butylammonium fluoride, and the like.

[0696] In step (c) above, a compound of formula I-2a is protected with a suitable hydroxyl protecting group. In certain embodiments, the protecting group PG⁴ used for protection of the 5′-hydroxyl group of a compound of formula I-2a includes an acid labile protecting group such as trityl, 4-methyoxytrityl, 4,4′-dimethyoxytrityl, 4,4′,4″-trimethyoxytrityl, 9-phenyl-xanthen-9-yl, 9-(p-tolyl)-xanthen-9-yl, pixyl, 2,7-dimethylpixyl, and the like. In certain embodiments, the acid labile protecting group is suitable for deprotection during both solution-phase and solid-phase synthesis of acid-sensitive nucleic acids or analogues thereof using for example, dichloroacetic acid or trichloroacetic acid.

[0697] In step (d) above, a compound of formula I-3a is treated with a P(III) forming reagent to afford a compound of formula I-5a. In the context of the present disclosure, a P(III) forming reagent is a phosphorus reagent that is reacted to for a phosphorus (III) compound. In some embodiments, the P(III) forming reagent is 2-cyanoethyl N,N-diisopropylchlorophosphoramidite or 2-cyanoethyl phosphorodichloridate. In certain embodiments, the P(III) forming reagent is 2-cyanoethyl N,N-diisopropylchlorophosphoramidite. One of ordinary skill would recognize that the displacement of a leaving group in a P(III) forming reagent by X¹ of a compound of formula I-3a is achieved either with or without the presence of a suitable base. Such suitable bases are well known in the art and include organic and inorganic bases. In certain embodiments, the base is a tertiary amine such as triethylamine or diisopropylethylamine. In other embodiments, step (d) above is preformed using N,N-dimethylphosphoramic dichloride as a P(V) forming reagent.

[0698] In some embodiments, the present disclosure provides a method for preparing an oligonucleotide comprising one or more lipid conjugates, further comprising preparing a nucleic acid-lipid conjugate or analogue thereof of formula Ia:

[chemical structure]

[0699] or a salt thereof, comprising the steps of:
[0700] (a) providing a nucleic acid or analogue thereof of formula I-1:

[chemical structure]

[0701] or salt thereof, and,
[0702] (b) conjugating one or more lipophilic compounds to a nucleic acid or analogue thereof of formula I-1 to form a nucleic acid or analogue thereof of formula Ia comprising one or more lipid conjugates, wherein: each of B, E, L, LC, n, PG¹, PG², R¹, R², X, X¹, and Z is as defined above and described herein.

[0703] In step (b) above, a nucleic acid or analogue thereof of formula I-1a is conjugated with one or more lipophilic compounds to form a compound of formula Ia comprising one more lipid conjugates of the disclosure. Typically, conjugation is performed through an esterification or amidation reaction between a nucleic acid or analogue thereof of formula I-1a and one or more fatty acids in series or in parallel by known techniques in the art. In certain embodiments, conjugation is performed under suitable amide forming conditions to afford a compound of formula I comprising one more lipid conjugates. Suitable amide forming conditions can include the use of an amide coupling reagent known in the art such as, but not limited to HATU, PyBOP, DCC, DIC, EDC, HBTU, HCTU, PyAOP, PyBrOP, BOP, BOP—Cl, DEPBT, T3P, TATU, TBTU, TNTU, TOTU, TPTU, TSTU, or TDBTU. Alternatively, conjugation of a lipophilic compound can be accomplished by any one of the cross-coupling technologies described in Table A herein.

[0704] In some embodiments, the present disclosure provides a method for preparing an oligonucleotide comprising one or more lipid conjugate, said lipid conjugate unit represent by formula II-1:

[chemical structure]

[0705] or a pharmaceutically acceptable salt thereof, comprising the steps of:
[0706] (a) providing an oligonucleotide of formula II-2:

[chemical structure]

[0707] or salt thereof, and,
[0708] (b) conjugating one or more lipophilic compounds to an oligonucleotide of formula II-2 to form an oligonucleotide of formula II-1 comprising one or more lipid conjugates. In step (b) above, an oligonucleotide of formula II-2 is conjugated with one or more lipophilic compounds to form an oligonucleotide of formula II-1 comprising one more lipid conjugates of the disclosure. Typically, conjugation is performed through an esterification or amidation reaction between an oligonucleotide of formula II-2 and one or more fatty acids in series or in parallel by known techniques in the art. In certain embodiments, conjugation is performed under suitable amide forming conditions to afford an oligonucleotide of formula II-1 comprising one more lipid conjugates. Suitable amide forming conditions can include the use of an amide coupling reagent known in the art such as, but not limited to HATU, PyBOP, DCC, DIC, EDC, HBTU, HCTU, PyAOP, PyBrOP, BOP, BOP—Cl, DEPBT, T3P, TATU, TBTU, TNTU, TOTU, TPTU, TSTU, or TDBTU. Alternatively, conjugation of a lipophilic compound can be accomplished by any one of the cross-coupling technologies described in Table A herein.

[0709] In some embodiments, the present disclosure provides a method for preparing an oligonucleotide comprising a unit represent by formula II-2:

[chemical structure]

[0710] or a pharmaceutically acceptable salt thereof, comprising the steps of:
[0711] (a) providing a nucleic acid or analogue thereof of formula I-8:

[chemical structure]

[0712] or salt thereof, and
[0713] (b) oligomerizing said compound of formula I-8 to form a compound of formula II-2.

[0714] In step (b) above, oligomerizing refers to preforming oligomerization forming conditions using known and commonly applied processes to prepare oligonucleotides in the art. For example, the compound of formula I-8 is coupled to a solid supported nucleic acid or analogue thereof bearing a 5′-hydroxyl group. Further steps can comprise one or more deprotections, couplings, phosphite oxidation, and cleavage from the solid support to provide an oligonucleotide of various nucleotide lengths, represented by a compound of formula II-2.

[0715] In some embodiments, the present disclosure provides a method for preparing a nucleic acid or analogue thereof comprising one or more lipid conjugate, further comprising preparing a nucleic acid or analogue thereof of formula I-8:

[chemical structure]

[0716] or a salt thereof, comprising the steps of:
[0717] (a) providing a nucleic acid or analogue thereof of formula I-1:

[chemical structure]

[0718] or salt thereof,
[0719] (b) deprotecting said nucleic acid or analogue thereof of formula I-1 to form a compound of formula I-6:

[chemical structure]

[0720] or salt thereof,
[0721] (c) protecting said nucleic acid or analogue thereof of formula I-6 to form a compound of formula I-7:

[chemical structure]

[0722] or salt thereof, and
[0723] (d) treating said nucleic acid or analogue thereof of formula I-7 with a P(III) forming reagent to form a nucleic acid or analogue thereof of formula I-8, In step (b) above, PG¹ and PG² of a compound of formula I-1 comprise silyl ethers or cyclic silylene derivatives that can be removed under acidic conditions or with fluoride anion. Examples of reagents providing fluoride anion for the removal of silicon-based protecting groups include hydrofluoric acid, hydrogen fluoride pyridine, triethylamine trihydrofluoride, tetra-N-butylammonium fluoride, and the like.

[0724] In step (c) above, a compound of formula I-6 is protected with a suitable hydroxyl protecting group. In certain embodiments, the protecting group PG⁴ used for protection of the 5′-hydroxyl group of a compound of formula I-6 includes an acid labile protecting group such as trityl, 4-methyoxytrityl, 4,4′-dimethyoxytrityl, 4,4′,4″-trimethyoxytrityl, 9-phenyl-xanthen-9-yl, 9-(p-tolyl)-xanthen-9-yl, pixyl, 2,7-dimethylpixyl, and the like. In certain embodiments, the acid labile protecting group is suitable for deprotection during both solution-phase and solid-phase synthesis of acid-sensitive nucleic acids or analogues thereof using for example, dichloroacetic acid or trichloroacetic acid.

[0725] In step (d) above, a compound of formula I-7 is treated with a P(III) forming reagent to afford a compound of formula I-8. In the context of the present disclosure, a P(III) forming reagent is a phosphorus reagent that is reacted to for a phosphorus (III) compound. In some embodiments, the P(III) forming reagent is 2-cyanoethyl N,N-diisopropylchlorophosphoramidite or 2-cyanoethyl phosphorodichloridate. In certain embodiments, the P(III) forming reagent is 2-cyanoethyl N,N-diisopropylchlorophosphoramidite. One of ordinary skill would recognize that the displacement of a leaving group in a P(III) forming reagent by X¹ of a compound of formula I-7 is achieved either with or without the presence of a suitable base. Such suitable bases are well known in the art and include organic and inorganic bases. In certain embodiments, the base is a tertiary amine such as triethylamine or diisopropylethylamine. In other embodiments, step (d) above is preformed using N,N-dimethylphosphoramic dichloride as a P(V) forming reagent.

[0726] In some embodiments, the present disclosure provides a method for preparing an oligonucleotide-ligand conjugate comprising one or more adamantyl and/or lipid moieties, said conjugate unit represented by formula II-b-3:

[chemical structure]

[0727] or a pharmaceutically acceptable salt thereof, comprising the steps of:
[0728] (a) providing a nucleic acid-ligand conjugate or analogue thereof of formula C11:

[chemical structure]

[0729] or salt thereof, and
[0730] (b) oligomerizing said compound of formula C11 to form a compound of formula II-b-3, In step (b) above, oligomerizing refers to preforming oligomerization forming conditions using known and commonly applied processes to prepare oligonucleotides in the art. For example, the compound of formula C11 is coupled to a solid supported nucleic acid or analogue thereof bearing a 5′-hydroxyl group. Further steps can comprise one or more deprotections, couplings, phosphite oxidation, and cleavage from the solid support to provide an oligonucleotide-ligand conjugate of various nucleotide lengths, with one or more nucleic acid-ligand conjugate units, wherein each unit is represented by a compound of formula II-b-3 comprising an adamantyl or lipid moiety of the disclosure.

[0731] In some embodiments, the method for preparing an oligonucleotide of formula II-b-3 comprising one or more lipid conjugate, further comprises preparing a nucleic acid-ligand conjugate or analogue thereof of formula C11:

[chemical structure]

[0732] or a salt thereof, comprising the steps of:
[0733] (a) providing a nucleic acid-ligand conjugate or analogue thereof of formula I-b:

[chemical structure]

[0734] or salt thereof,
[0735] (b) deprotecting said nucleic acid-ligand conjugate or analogue thereof of formula I-b to form a compound of formula C8:

[chemical structure]

[0736] or salt thereof,
[0737] (c) protecting said nucleic acid-ligand conjugate or analogue thereof of formula C8 to form a compound of formula C9:

[chemical structure]

[0738] or salt thereof, and
[0739] (d) treating said nucleic acid-ligand conjugate or analogue thereof of formula C9 with a P(III) forming reagent to form a nucleic acid or analogue thereof of formula C11. In step (b) above, PG¹ and PG² of a compound of formula I-b comprise silyl ethers or cyclic silylene derivatives that can be removed under acidic conditions or with fluoride anion. Examples of reagents providing fluoride anion for the removal of silicon-based protecting groups include hydrofluoric acid, hydrogen fluoride pyridine, triethylamine trihydrofluoride, tetra-N-butylammonium fluoride, and the like.

[0740] In step (c) above, a compound of formula C8 is protected with a suitable hydroxyl protecting group. In certain embodiments, the protecting group PG⁴ used for protection of the 5′-hydroxyl group of a compound of formula C8 includes an acid labile protecting group such as trityl, 4-methyoxytrityl, 4,4′-dimethyoxytrityl, 4,4′,4″-trimethyoxytrityl, 9-phenyl-xanthen-9-yl, 9-(p-tolyl)-xanthen-9-yl, pixyl, 2,7-dimethylpixyl, and the like. In certain embodiments, the acid labile protecting group is suitable for deprotection during both solution-phase and solid-phase synthesis of acid-sensitive nucleic acids or analogues thereof using for example, dichloroacetic acid or trichloroacetic acid.

[0741] In step (d) above, a compound of formula C9 is treated with a P(III) forming reagent to afford a compound of formula C11. In the context of the present disclosure, a P(III) forming reagent is a phosphorus reagent that is reacted to for a phosphorus (III) compound. In some embodiments, the P(III) forming reagent is 2-cyanoethyl N,N-diisopropylchlorophosphoramidite or 2-cyanoethyl phosphorodichloridate. In certain embodiments, the P(III) forming reagent is 2-cyanoethyl N,N-diisopropylchlorophosphoramidite. One of ordinary skill would recognize that the displacement of a leaving group in a P(III) forming reagent by X¹ of a compound of formula C9 is achieved either with or without the presence of a suitable base. Such suitable bases are well known in the art and include organic and inorganic bases. In certain embodiments, the base is a tertiary amine such as triethylamine or diisopropylethylamine. In other embodiments, step (d) above is preformed using N,N-dimethylphosphoramic dichloride as a P(V) forming reagent.

[0742] In some embodiments, the present disclosure provides a method for preparing an oligonucleotide-ligand conjugate of formula II-b-3 comprising one or more nucleic acid-ligand conjugate units each comprising one or more adamantyl or lipid moieties, further comprising preparing a nucleic acid-ligand conjugate or analogue thereof of formula I-b:

[chemical structure]

[0743] or a salt thereof, comprising the steps of:
[0744] (a) providing a nucleic acid-ligand conjugate or analogue thereof of formula C6:

[chemical structure]

[0745] or salt thereof, and,
[0746] (b) conjugating a lipophilic compound to a nucleic acid or analogue thereof of formula C6 to form a nucleic acid-ligand conjugate or analogue thereof of formula I-b comprising one or more adamantyl and/or lipid conjugates. In step (b) above, conjugation is performed under suitable amide forming conditions to afford a compound of formula I-b comprising an adamantyl and/or lipid conjugate. Suitable amide forming conditions can include the use of an amide coupling reagent known in the art such as, but not limited to HATU, PyBOP, DCC, DIC, EDC, HBTU, HCTU, PyAOP, PyBrOP, BOP, BOP—Cl, DEPBT, T3P, TATU, TBTU, TNTU, TOTU, TPTU, TSTU, or TDBTU. In certain embodiments, the amide forming conditions comprise HATU and DIPEA or TEA.

[0747] In certain embodiments, a nucleic acid-ligand conjugate or analogue thereof of formula C6 is provided in salt form (e.g., a fumarate salt) and is first converted to the free base (e.g., using sodium bicarbonate) before preforming the conjugation step.

[0748] In some embodiments, the present disclosure provides a method for preparing an oligonucleotide-ligand conjugate of formula II-b-3 comprising one or more nucleic acid-ligand conjugate units, further comprises preparing a nucleic acid-ligand conjugate or analogue thereof of formula C6:

[chemical structure]

[0749] or a salt thereof, comprising the steps of:
[0750] (a) providing a nucleic acid or analogue thereof of formula C1:

[chemical structure]

[0751] or salt thereof, and,
[0752] (b) protecting said nucleic acid or analogue thereof of formula C1 to form a compound of formula C2:

[chemical structure]

[0753] or salt thereof,
[0754] (c) alkylating said nucleic acid or analogue thereof of formula C2 to form a compound of formula C3:

[chemical structure]

[0755] or salt thereof,
[0756] (d) substituting said nucleic acid or analogue thereof of formula C3 with a compound of formula C4:

[chemical structure]

[0757] or salt thereof, to form a compound of formula C5:

[chemical structure]

[0758] or salt thereof,
[0759] (e) deprotecting said nucleic acid or analogue thereof of formula C5 to form a nucleic acid-ligand conjugate or analogue thereof of formula C6. In step (b) above, PG¹ and PG² groups of formula C2 are taken together with their intervening atoms to form a cyclic diol protecting group, such as a cyclic acetal or ketal. Such groups include methylene, ethylidene, benzylidene, isopropylidene, cyclohexylidene, and cyclopentylidene, silylene derivatives such as di-t-butylsilylene and 1,1,3,3-tetraisopropylidisiloxanylidene, a cyclic carbonate, a cyclic boronate, and cyclic monophosphate derivatives based on cyclic adenosine monophosphate (i.e., cAMP). In certain embodiments, the cyclic diol protection group is 1,1,3,3-tetraisopropylidisiloxanylidene prepared from the reaction of a diol of formula C1 and 1,3-dichloro-1,1,3,3-tetraisopropyldisiloxane under basic conditions.

[0760] In step (c) above, a nucleic acid or analogue thereof of formula C2 is alkylated with a mixture of DMSO and acetic anhydride under acidic conditions. In certain embodiments, when —V—H is a hydroxyl group, the mixture of DMSO and acetic anhydride in the presence of acetic acid forms (methylthio)methyl acetate in situ via the Pummerer rearrangement which then reacts with the hydroxyl group of the nucleic acid or analogue thereof of formula C2 to provide a monothioacetal functionalized fragment nucleic acid or analogue thereof of formula C3.

[0761] In step (d) above, substitution of the thiomethyl group of a nucleic acid or analogue thereof of formula C3 using a nucleic acid or analogue thereof of formula C4 affords a nucleic acid or analogue thereof of formula C4. In certain embodiments, substitution occurs under mild oxidizing and/or acidic conditions. In some embodiments, V is oxygen. In some embodiments, the mild oxidation reagent includes a mixture of elemental iodine and hydrogen peroxide, urea hydrogen peroxide complex, silver nitrate/silver sulfate, sodium bromate, ammonium peroxodisulfate, tetrabutylammonium peroxydisulfate, Oxone®, Chloramine T, Selectfluor®, Selectfluor® II, sodium hypochlorite, or potassium iodate/sodium periodiate. In certain embodiments, the mild oxidizing agent includes N-iodosuccinimide, N-bromosuccinimide, N-chlorosuccinimide, 1,3-diiodo-5,5-dimethylhydantion, pyridinium tribromide, iodine monochloride or complexes thereof, etc. Acids that are typically used under mild oxidizing condition include sulfuric acid, p-toluenesulfonic acid, trifluoromethanesulfonic acid, methanesulfonic acid, and trifluoroacetic acid. In certain embodiments, the mild oxidation reagent includes a mixture of N-iodosuccinimide and trifluoromethanesulfonic acid.

[0762] In step (e) above, removal of PG³ and optionally R⁴ (when R⁴ is a suitable amine protecting group) of a nucleic acid-ligand conjugate or analogue thereof of formula C5 affords a nucleic acid-ligand conjugate or analogue thereof of formula C6 or a salt thereof. In some embodiments, PG³ and/or R⁴ comprise carbamate derivatives that can be removed under acidic or basic conditions. In certain embodiments, the protecting groups (e.g., both PG³ and R⁴ or either of PG³ or R⁴ independently) of a nucleic acid-ligand conjugate or analogue thereof of formula C5 are removed by acid hydrolysis. It will be appreciated that upon acid hydrolysis of the protecting groups of a nucleic acid-ligand conjugate or analogue thereof of formula C5, a salt of formula C6 thereof is formed. For example, when an acid-labile protecting group of a nucleic acid-ligand conjugate or analogue thereof of formula C5 is removed by treatment with an acid such as hydrochloric acid, then the resulting amine compound would be formed as its hydrochloride salt. One of ordinary skill in the art would recognize that a wide variety of acids are useful for removing amino protecting groups that are acid-labile and therefore a wide variety of salt forms of a nucleic acid or analogue thereof of formula C6 are contemplated.

[0763] In other embodiments, the protecting groups (e.g., both PG³ and R⁴ or either of PG³ or R⁴ independently) of a nucleic acid or analogue thereof of formula C5 are removed by base hydrolysis. For example, Fmoc and trifluoroacetyl protecting groups can be removed by treatment with base. One of ordinary skill in the art would recognize that a wide variety of bases are useful for removing amino protecting groups that are base-labile. In some embodiments, a base is piperidine. In some embodiments, a base is 1,8-diazabicyclo[5.4.0]undec-7-ene (DBU). In certain embodiments, a nucleic acid-ligand conjugate or analogue thereof of formula C5 is deprotected under basic conditions followed by treating with an acid to form a salt of formula C6. In certain embodiments, the acid is fumaric acid the salt of formula C6 is the fumarate.

[0764] In some embodiments, the present disclosure provides a method for preparing an oligonucleotide-ligand conjugate comprising one or more nucleic acid-ligand conjugate, said nucleic acid-ligand conjugate unit represented by formula II-b-3:

[chemical structure]

[0765] or a pharmaceutically acceptable salt thereof, comprising the steps of:
[0766] (a) providing an oligonucleotide of formula D5:

[chemical structure]

[0767] or salt thereof, and,
[0768] (b) conjugating one or more adamantyl or lipophilic compounds to an oligonucleotide of formula D5 to form an oligonucleotide-ligand conjugate of formula II-b-3 comprising one or more nucleic acid-ligand conjugate units. In step (b) above, conjugation is performed under suitable amide forming conditions to afford a compound of formula D5 comprising an adamantyl or lipid conjugate. Suitable amide forming conditions can include the use of an amide coupling reagent known in the art such as, but not limited to HATU, PyBOP, DCC, DIC, EDC, HBTU, HCTU, PyAOP, PyBrOP, BOP, BOP—Cl, DEPBT, T3P, TATU, TBTU, TNTU, TOTU, TPTU, TSTU, or TDBTU. In certain embodiments, the amide forming conditions comprise HATU and DIPEA or TEA.

[0769] In some embodiments, the present disclosure provides a method for preparing an oligonucleotide-ligand conjugate comprising a unit represent by formula D5:

[chemical structure]

[0770] or a salt thereof, comprising the steps of:
[0771] (a) providing a nucleic acid-ligand conjugate or analogue thereof of formula D4:

[chemical structure]

[0772] or salt thereof, and
[0773] (b) deprotecting said compound of formula D4 to form a compound of formula D5. In step (b) above, removal of PG³ and optionally R⁴ (when R⁴ is a suitable amine protecting group) of an oligonucleotide of formula D4 affords an oligonucleotide-ligand conjugate of formula D5 or a salt thereof. In some embodiments, PG³ and/or R⁴ comprise carbamate derivatives that can be removed under acidic or basic conditions. In certain embodiments, the protecting groups (e.g., both PG³ and R⁴ or either of PG³ or R⁴ independently) of an oligonucleotide-ligand conjugate of formula D4 are removed by acid hydrolysis. It will be appreciated that upon acid hydrolysis of the protecting groups of an oligonucleotide-ligand conjugate of formula D4, a salt of formula D5 thereof is formed. For example, when an acid-labile protecting group of an oligonucleotide of formula D4 is removed by treatment with an acid such as hydrochloric acid, then the resulting amine compound would be formed as its hydrochloride salt. One of ordinary skill in the art would recognize that a wide variety of acids are useful for removing amino protecting groups that are acid-labile and therefore a wide variety of salt forms of a nucleic acid-ligand conjugate unit or analogue thereof of formula D5 are contemplated.

[0774] In other embodiments, the protecting groups (e.g., both PG³ and R⁴ or either of PG³ or R⁴ independently) of an oligonucleotide-ligand conjugate of formula D4 are removed by base hydrolysis. For example, Fmoc and trifluoroacetyl protecting groups can be removed by treatment with base. One of ordinary skill in the art would recognize that a wide variety of bases are useful for removing amino protecting groups that are base-labile. In some embodiments, a base is piperidine. In some embodiments, a base is 1,8-diazabicyclo[5.4.0]undec-7-ene (DBU).

[0775] In some embodiments, the present disclosure provides a method for preparing an oligonucleotide-ligand conjugate comprising one or more nucleic acid-ligand conjugate unit with one or more adamantyl and/or lipid moiety, said conjugate unit represented by formula D4:

[chemical structure]

[0776] or a pharmaceutically acceptable salt thereof, comprising the steps of:
[0777] (a) providing a nucleic acid or analogue thereof of formula D3:

[chemical structure]

[0778] or salt thereof, and
[0779] (b) oligomerizing said compound of formula D3 to form a compound of formula D4,

[0780] In step (b) above, oligomerizing refers to preforming oligomerization forming conditions using known and commonly applied processes to prepare oligonucleotides in the art. For example, the nucleic acid or analogue thereof of formula D3 is coupled to a solid supported nucleic acid or analogue thereof bearing a 5′-hydroxyl group. Further steps can comprise one or more deprotections, couplings, phosphite oxidation, and cleavage from the solid support to provide an oligonucleotide of various nucleotide lengths, represented by a compound of formula D4 comprising an adamantyl or lipid conjugate of the disclosure.

[0781] In some embodiments, the present disclosure provides a method for preparing a nucleic acid or analogue thereof comprising one or more lipid conjugate, further comprising preparing a nucleic acid or analogue thereof of formula D3:

[chemical structure]

[0782] or a salt thereof, comprising the steps of:
[0783] (a) providing a nucleic acid or analogue thereof of formula C5:

[chemical structure]

[0784] or salt thereof,
[0785] (b) deprotecting said nucleic acid or analogue thereof of formula C5 to form a compound of formula D1:

[chemical structure]

[0786] or salt thereof,
[0787] (c) protecting said nucleic acid or analogue thereof of formula D1 to form a nucleic acid or analogue thereof of formula D2:

[chemical structure]

[0788] or salt thereof, and
[0789] (d) treating said nucleic acid or analogue thereof of formula D2 with a P(III) forming reagent to form a nucleic acid or analogue thereof of formula D3. In step (b) above, PG¹ and PG² of a nucleic acid or analogue thereof of formula C5 comprise silyl ethers or cyclic silylene derivatives that can be removed under acidic conditions or with fluoride anion. Examples of reagents providing fluoride anion for the removal of silicon-based protecting groups include hydrofluoric acid, hydrogen fluoride pyridine, triethylamine trihydrofluoride, tetra-N-butylammonium fluoride, and the like.

[0790] In step (c) above, a nucleic acid or analogue thereof of formula D1 is protected with a suitable hydroxyl protecting group. In certain embodiments, the protecting group PG⁴ used for protection of the 5′-hydroxyl group of a compound of formula D1 includes an acid labile protecting group such as trityl, 4-methyoxytrityl, 4,4′-dimethyoxytrityl, 4,4′,4″-trimethyoxytrityl, 9-phenyl-xanthen-9-yl, 9-(p-tolyl)-xanthen-9-yl, pixyl, 2,7-dimethylpixyl, and the like. In certain embodiments, the acid labile protecting group is suitable for deprotection during both solution-phase and solid-phase synthesis of acid-sensitive nucleic acids or analogues thereof using for example, dichloroacetic acid or trichloroacetic acid.

[0791] In step (d) above, a nucleic acid or analogue thereof of formula D2 is treated with a P(III) forming reagent to afford a compound of formula D3. In the context of the present disclosure, a P(III) forming reagent is a phosphorus reagent that is reacted to for a phosphorus (III) compound. In some embodiments, the P(III) forming reagent is 2-cyanoethyl N,N-diisopropylchlorophosphoramidite or 2-cyanocthyl phosphorodichloridate. In certain embodiments, the P(III) forming reagent is 2-cyanocthyl N,N-diisopropylchlorophosphoramidite. One of ordinary skill would recognize that the displacement of a leaving group in a P(III) forming reagent by X¹ of a compound of formula D2 is achieved either with or without the presence of a suitable base. Such suitable bases are well known in the art and include organic and inorganic bases. In certain embodiments, the base is a tertiary amine such as triethylamine or diisopropylethylamine. In other embodiments, step (d) above is preformed using N,N-dimethylphosphoramic dichloride as a P(V) forming reagent.

### Formulations

[0792] Various formulations have been developed to facilitate oligonucleotide use. For example, oligonucleotides (e.g., lipid-conjugated RNAi oligonucleotides) can be delivered to a subject or a cellular environment using a formulation that minimizes degradation, facilitates delivery and/or uptake, or provides another beneficial property to the oligonucleotides in the formulation. In some embodiments, provided herein are compositions comprising oligonucleotides (e.g., lipid-conjugated RNAi oligonucleotides) reduce the expression of a target mRNA (e.g., a target mRNA expressed in an neurons of the CNS) . . . . In some embodiments, provided herein are compositions comprising oligonucleotides (e.g., lipid-conjugated RNAi oligonucleotides) reduce the expression of a target mRNA expressed in one or more tissues or cells of a subject. Such compositions can be suitably formulated such that when administered to a subject, either into the immediate environment of a target cell or systemically, a sufficient portion of the oligonucleotides enter the cell to reduce target gene expression. Any variety of suitable oligonucleotide formulations can be used to deliver oligonucleotides for the reduction of target gene expression as disclosed herein. In some embodiments, an oligonucleotide is formulated in buffer solutions such as phosphate buffered saline solutions, liposomes, micellar structures, and capsids.

[0793] In some embodiments, the formulations herein comprise an excipient. In some embodiments, an excipient confers to a composition improved stability, improved absorption, improved solubility and/or therapeutic enhancement of the active ingredient. In some embodiments, an excipient is a buffering agent (e.g., sodium citrate, sodium phosphate, a tris base, or sodium hydroxide) or a vehicle (e.g., a buffered solution, petrolatum, dimethyl sulfoxide, or mineral oil). In some embodiments, an oligonucleotide is lyophilized for extending its shelf-life and then made into a solution before use (e.g., administration to a subject). Accordingly, an excipient in a composition comprising any one of the oligonucleotides described herein may be a lyoprotectant (e.g., mannitol, lactose, polyethylene glycol or polyvinylpyrrolidone) or a collapse temperature modifier (e.g., dextran, Ficoll™ or gelatin). Likewise, the oligonucleotides herein may be provided in the form of their free acids.

[0794] In some embodiments, a pharmaceutical composition is formulated to be compatible with its intended route of administration. Examples of routes of administration include parenteral (e.g., intravenous, intramuscular, intraperitoneal, intradermal, subcutaneous, intrathecal), oral (e.g., inhalation), transdermal (e.g., topical), transmucosal and rectal administration. In some embodiments, a pharmaceutical composition is formulated for delivery to the central nervous system (e.g., intrathecal, epidural). In some embodiments, a pharmaceutical composition is formulated for delivery to the eye (e.g., ophthalmic, intraocular, subconjunctival, intravitreal, retrobulbar, intracameral).

[0795] Pharmaceutical compositions suitable for injectable use include sterile aqueous solutions (where water soluble) or dispersions and sterile powders for the extemporaneous preparation of sterile injectable solutions or dispersions. For intravenous administration, suitable carriers include physiological saline, bacteriostatic water, Cremophor EL™ (BASF, Parsippany, N.J.) or phosphate buffered saline (PBS). The carrier can be a solvent or dispersion medium containing, for example, water, ethanol, polyol (e.g., glycerol, propylene glycol, and liquid polyethylene glycol, and the like), and suitable mixtures thereof. In many cases, it will be preferable to include isotonic agents, for example, sugars, polyalcohols such as mannitol, sorbitol, sodium chloride in the composition. Sterile injectable solutions can be prepared by incorporating the oligonucleotides in a required amount in a selected solvent with one or a combination of ingredients enumerated above, as required, followed by filtered sterilization.

[0796] In some embodiments, a composition may contain at least about 0.1% of the therapeutic agent (e.g., an lipid-conjugated RNAi oligonucleotide herein) or more, although the percentage of the active ingredient(s) may be between about 1% to about 80% or more of the weight or volume of the total composition. Factors such as solubility, bioavailability, biological half-life, route of administration, product shelf life, as well as other pharmacological considerations will be contemplated by one skilled in the art of preparing such pharmaceutical formulations, and as such, a variety of dosages and treatment regimens may be desirable.

### Structural Modifications

[0797] As nucleic acids are polymers of subunits or compounds, many of the modifications described below occur at a position which is repeated within a nucleic acid (e.g., a modification of a base, or a phosphate moiety, or the non-bridging oxygen of a phosphate moiety). In some cases the modification will occur at all of the subject positions in the nucleic acid but in many, and in fact in most cases it will not. By way of example, a modification may only occur at a 3′ or 5′ terminal position, may only occur in the internal unpaired region, may only occur in a terminal regions, e.g. at a position on a terminal nucleotide or in the last 2, 3, 4, 5, or 10 nucleotides of a strand. In some embodiments, a modification occurs at all of the subject positions in the nucleic acid. A modification may occur in a double strand region, a single strand region, or in both. A modification may occur only in the double strand region of an RNA agent or may only occur in a single strand region of an RNA agent. (e.g., a phosphorothioate modification at a non-bridging oxygen position may only occur at one or both termini, may only occur in a terminal regions or at a position on a terminal nucleotide or in the last 2, 3, 4, 5, or 10 nucleotides of a strand, or may occur in double strand and single strand regions, particularly at termini. The 5′ end or ends can be phosphorylated.

[0798] Many studies in the art have indicated that modified oligonucleotides and oligonucleotide analogs may be less readily internalized than their natural counterparts. As a result, the activity of many previously available RNAi trigger molecules has not been sufficient for practical therapeutic, research or diagnostic purposes.

[0799] Modifications to enhance the effectiveness of the RNAi trigger molecule oligonucleotides and overcome these problems have taken many forms. These modifications include base ring modifications, sugar moiety modifications, and sugar-phosphate backbone modifications, many exemplified herein and used in the current disclosure. Prior sugar-phosphate backbone modifications, particularly on the phosphorus atom, have affected various levels of resistance to nucleases. However, while the ability of an RNAi trigger molecule oligonucleotide to load into the RISC and direct the location of relevant mRNA sequences is fundamental to RNAi trigger molecule methodology, many modifications work at cross purposes with each other to optimize the behavior of the RNAi trigger. It is this balancing act which must be taken into account relative to the development of superior and effective RNAi molecules.

[0800] Another key factor is the stereochemical effect that arises in oligomers having P-chiral centers. In general, an oligomer with a length of n nucleosides will constitute a mixture of chirality in successive non-stereospecific chain synthesis. It has been observed that Rp and Sp homochiral chains, whose absolute configuration at all internucleotide methane phosphonate phosphorus atoms are either Rp or Sp, and non-stereoregular chains show different physicochemical properties as well as different capabilities of forming adducts with oligonucleotides of complementary sequence. In addition, phosphorothioate analogs of nucleotides have shown substantial stereoselectivity differences between Oligo-Rp and Oligo-Sp oligonucleotides in resistance to nucleases activity (Potter, BIOCHEMISTRY, 22:1369, (1983); Bryant et al., BIOCHEMISTRY, 18:2825, (1979)). Lesnikowski (NUCL. ACIDS RES., 18:2109, (1990)) observed that diastereomerically pure octathymidine methylphosphonates, in which six out of seven methylphosphonate bonds have defined configuration at the phosphorus atom when complexed with the matrix showed substantial differences in melting temperatures. According to the current disclosure chirally pure nucleotide analogs, or portions thereof, are expected to provide trigger structures with improved characteristics allowing the development of more potent and longer lasting RNAi triggers.

[0801] In some embodiments of the current disclosure it is particularly preferred to enhance stability, to include particular bases in overhangs, or to include modified nucleotides or nucleotide surrogates, in single strand overhangs, e.g., in a 5′ or 3′ overhang, or in both. Likewise, it can be desirable to include purine nucleotides in overhangs as they are more resistant to nuclease activity. In some embodiments all or some of the bases in a 3′ or 5′ overhang will be modified, with a modification described herein. Modifications can include the use of modifications at the 2′ OH group of the ribose sugar, deoxythymidine, instead of ribonucleotides, and modifications in the phosphate group, that is, phosphothioate modifications. Overhangs need not be homologous with the target sequence.

### Methods of Use

### Reducing Target Gene Expression

[0802] In some embodiments, the disclosure provides methods for contacting or delivering to a cell or population of cells an effective amount of any of the lipid-conjugated RNAi oligonucleotides herein to reduce expression of a target gene.

[0803] In some embodiments, expression of a target gene is reduced in one or more tissues or cells in a subject. In some embodiments, expression of a target gene is reduced in the central nervous system (CNS). In some embodiments, expression of a target gene is reduced in ocular tissue. In some embodiments, expression of a target gene is reduced in the liver. In some embodiments, expression of a target gene is reduced in adipose tissue. In some embodiments, expression of a target gene is reduced in adrenal tissue. In some embodiments, expression of a target gene is reduced in skeletal muscle tissue. In some embodiments, expression of a target gene is reduced in the heart. In some embodiments, expression of a target gene is reduced in the lung.

[0804] In some embodiments, a reduction of target gene expression is determined by measuring a reduction in the amount or level of target mRNA, protein encoded by the target mRNA, or target gene (mRNA or protein) activity in a cell. The methods include those described herein and known to one of ordinary skill in the art.

[0805] Methods provided herein are useful in any appropriate cell type. In some embodiments, a cell is any cell that expresses the target mRNA. In some embodiments, the cell is a primary cell obtained from a subject. In some embodiments, the primary cell has undergone a limited number of passages such that the cell substantially maintains is natural phenotypic properties. In some embodiments, a cell to which the oligonucleotide is delivered is ex vivo or in vitro (i.e., can be delivered to a cell in culture or to an organism in which the cell resides).

[0806] In some embodiments, the lipid-conjugated RNAi oligonucleotides disclosed herein are delivered to a cell or population of cells using a nucleic acid delivery method known in the art including, but not limited to, injection of a solution or pharmaceutical composition containing the lipid-conjugated RNAi oligonucleotide, bombardment by particles covered by the lipid-conjugated RNAi oligonucleotide, exposing the cell or population of cells to a solution containing the lipid-conjugated RNAi oligonucleotide, or electroporation of cell membranes in the presence of the lipid-conjugated RNAi oligonucleotide. Other methods known in the art for delivering oligonucleotides to cells may be used, such as lipid-mediated carrier transport, chemical-mediated transport, and cationic liposome transfection such as calcium phosphate, and others.

[0807] In some embodiments, reduction of target gene expression is determined by an assay or technique that evaluates one or more molecules, properties or characteristics of a cell or population of cells associated with target gene expression, or by an assay or technique that evaluates molecules that are directly indicative of target gene expression in a cell or population of cells (e.g., target mRNA or protein). In some embodiments, the extent to which a lipid-conjugated RNAi oligonucleotide provided herein reduces target gene expression in a cell is evaluated by comparing target gene expression in a cell or population of cells contacted with the lipid-conjugated RNAi oligonucleotide to a control cell or population of cells (e.g., a cell or population of cells not contacted with the lipid-conjugated RNAi oligonucleotide or contacted with a control lipid-conjugated RNAi oligonucleotide). In some embodiments, a control amount or level of target gene expression in a control cell or population of cells is predetermined, such that the control amount or level need not be measured in every instance the assay or technique is performed. The predetermined level or value can take a variety of forms. In some embodiments, a predetermined level or value can be single cut-off value, such as a median or mean.

[0808] In some embodiments, contacting or delivering a lipid-conjugated RNAi oligonucleotide described herein to a cell or a population of cells results in a reduction in expression of a target gene. In some embodiments, the reduction in target gene expression is relative to a control amount or level of target gene expression in cell or population of cells not contacted with the lipid-conjugated RNAi oligonucleotide or contacted with a control lipid-conjugated RNAi oligonucleotide. In some embodiments, the reduction in target gene expression is about 1% or lower, about 5% or lower, about 10% or lower, about 15% or lower, about 20% or lower, about 25% or lower, about 30% or lower, about 35% or lower, about 40% or lower, about 45% or lower, about 50% or lower, about 55% or lower, about 60% or lower, about 70% or lower, about 80% or lower, or about 90% or lower relative to a control amount or level of target gene expression. In some embodiments, the control amount or level of target gene expression is an amount or level of target mRNA and/or protein in a cell or population of cells that has not been contacted with a lipid-conjugated RNAi oligonucleotide herein. In some embodiments, the effect of delivery of a lipid-conjugated RNAi oligonucleotide to a cell or population of cells according to a method herein is assessed after any finite period or amount of time (e.g., minutes, hours, days, weeks, months). For example, in some embodiments, target gene expression is determined in a cell or population of cells at least about 4 hours, about 8 hours, about 12 hours, about 18 hours, about 24 hours; or at least about 1 day, about 2 days, about 3 days, about 4 days, about 5 days, about 6 days, about 7 days, about 8 days, about 9 days, about 10 days, about 11 days, about 12 days, about 13 days, about 14 days, about 21 days, about 28 days, about 35 days, about 42 days, about 49 days, about 56 days, about 63 days, about 70 days, about 77 days, or about 84 days or more after contacting or delivering the lipid-conjugated RNAi oligonucleotide to the cell or population of cells. In some embodiments, target gene expression is determined in a cell or population of cells at least about 1 month, about 2 months, about 3 months, about 4 months, about 5 months, or about 6 months or more after contacting or delivering the lipid-conjugated RNAi oligonucleotide to the cell or population of cells.

### Reducing Target Gene Expression in the CNS

[0809] In some embodiments, expression of a target gene (e.g., neuronal target gene) is reduced in a region of the CNS. In some embodiments, expression of a target gene is reduced in at least one region of the CNS. In some embodiments, a region of the CNS is one or more tissues of the CNS. In some embodiments, regions of the CNS include, but are not limited to, cerebrum, prefrontal cortex, frontal cortex, motor cortex, temporal cortex, parietal cortex, occipital cortex, somatosensory cortex, hippocampus, caudate, striatum, globus pallidus, thalamus, midbrain, tegmentum, substantia nigra, pons, brainstem, cerebellar white matter, cerebellum, dentate nucleus, medulla, cervical spinal cord, thoracic spinal cord, lumbar spinal cord, cervical dorsal root ganglion, thoracic dorsal root ganglion, lumbar dorsal root ganglion, sacral dorsal root ganglion, nodose ganglia, femoral nerve, sciatic nerve, sural nerve, amygdala, hypothalamus, putamen, corpus callosum, and cranial nerve. In some embodiments, the region of the CNS is selected from the spinal cord, lumbar dorsal root ganglion, medulla, hippocampus, frontal cortex, brain stem, cerebellum, and a combination thereof. In some embodiments, expression of a target gene is reduced in at least one region of the CNS, selected from frontal cortex, medulla, hippocampus, hypothalamus, cerebellum, lumbar spinal cord, lumbar dorsal root ganglion, and any combination thereof.

[0810] In some embodiments, expression of a neuronal target gene is reduced in at least one tissue of the CNS. In some embodiments, expression of an astrocyte target gene is reduced in at least one tissue of the CNS. In some embodiments, expression of an oligodendrocyte target gene is reduced in at least one tissue of the CNS. In some embodiments, expression of a target mRNA in a neuron is reduced in at least one tissue of the CNS. In some embodiments, expression of a target mRNA in an astrocyte is reduced in at least one tissue of the CNS. In some embodiments, expression of a target mRNA in an oligodendrocyte is reduced in at least one tissue of the CNS.

[0811] In some embodiments, expression of a target mRNA in a neuron is reduced in at least one tissue of the CNS, selected from frontal cortex, medulla, hippocampus, hypothalamus, cerebellum, lumbar spinal cord, lumbar dorsal root ganglion, and any combination thereof. In some embodiments, expression of a target mRNA in an astrocyte is reduced in at least one tissue of the CNS, selected from frontal cortex, medulla, hippocampus, hypothalamus, cerebellum, lumbar spinal cord, lumbar dorsal root ganglion, and any combination thereof. In some embodiments, expression of a target mRNA in an oligodendrocyte is reduced in at least one tissue of the CNS, selected from frontal cortex, medulla, hippocampus, hypothalamus, cerebellum, lumbar spinal cord, lumbar dorsal root ganglion, and any combination thereof.

[0812] In some embodiments, expression of a target gene in the CNS of a subject is reduced by at least about 30%, about 35%, about 40%, about 45%, about 50%, about 55%, about 60%, about 65%, about 70%, about 75%, about 80%, about 85%, about 90%, about 95%, about 99% or greater than 99% when compared to target gene expression in a control tissue.

[0813] In some embodiments, expression of a target gene in an astrocyte of a subject is reduced by at least about 30%, about 35%, about 40%, about 45%, about 50%, about 55%, about 60%, about 65%, about 70%, about 75%, about 80%, about 85%, about 90%, about 95%, about 99% or greater than 99% when compared to target gene expression in a non-target cell.

[0814] In some embodiments, expression of a target gene in an oligodendrocyte of a subject is reduced by at least about 30%, about 35%, about 40%, about 45%, about 50%, about 55%, about 60%, about 65%, about 70%, about 75%, about 80%, about 85%, about 90%, about 95%, about 99% or greater than 99% when compared to target gene expression in a non-target cell.

[0815] In some embodiments, expression of a target gene in the neurons of a subject is reduced by at least about 30%, about 35%, about 40%, about 45%, about 50%, about 55%, about 60%, about 65%, about 70%, about 75%, about 80%, about 85%, about 90%, about 95%, about 99% or greater than 99% when compared to target gene expression in a non-target cell.

[0816] In some embodiments, contacting or delivering a lipid-conjugated RNAi oligonucleotide described herein to a cell or a population of cells results in a reduction in expression of a target gene in a neuron. In some embodiments, the reduction in expression of a target gene in a neuron is relative to an amount or level of target gene expression in an astrocyte contacted with the lipid-conjugated RNAi oligonucleotide. In some embodiments, the reduction expression of a target gene in a neuron is about 1% or lower, about 5% or lower, about 10% or lower, about 15% or lower, about 20% or lower, about 25% or lower, about 30% or lower, about 35% or lower, about 40% or lower, about 45% or lower, about 50% or lower, about 55% or lower, about 60% or lower, about 70% or lower, about 80% or lower, or about 90% or lower relative to a level of target gene expression in an astrocyte. In some embodiments, the reduction in expression of a target gene in a neuron is relative to an amount or level of target gene expression in an oligodendrocyte contacted with the lipid-conjugated RNAi oligonucleotide. In some embodiments, the reduction in expression of a target gene in a neuron is about 1% or lower, about 5% or lower, about 10% or lower, about 15% or lower, about 20% or lower, about 25% or lower, about 30% or lower, about 35% or lower, about 40% or lower, about 45% or lower, about 50% or lower, about 55% or lower, about 60% or lower, about 70% or lower, about 80% or lower, or about 90% or lower relative to a level of target gene expression in an oligodendrocyte.

[0817] In some embodiments, reduction in expression of a target gene in an astrocyte is increased by at least 1%, at least 5%, at least 10%, at least 15%, at least 20%, at least 25%, at least 30%, at least 35%, at least 40%, at least 45%, at least 50%, at least 55%, at least 60%, at least 70%, at least 80%, or at least 90% relative to reduction in expression of the target gene in a neuron. In some embodiments, the reduction in expression of a target gene in an oligodendrocyte is increased by at least 1%, at least 5%, at least 10%, at least 15%, at least 20%, at least 25%, at least 30%, at least 35%, at least 40%, at least 45%, at least 50%, at least 55%, at least 60%, at least 70%, at least 80%, or at least 90% relative to reduction in expression of the target gene in a neuron.

[0818] In some embodiments, contacting or delivering a lipid-conjugated RNAi oligonucleotide described herein to a cell or a population of cells results in a reduction in expression of target gene in an astrocyte. In some embodiments, the reduction in expression of a target gene in an astrocyte is relative to an amount or level of target gene expression in a neuron contacted with the lipid-conjugated RNAi oligonucleotide. In some embodiments, the reduction in expression of a target gene in an astrocyte is about 1% or lower, about 5% or lower, about 10% or lower, about 15% or lower, about 20% or lower, about 25% or lower, about 30% or lower, about 35% or lower, about 40% or lower, about 45% or lower, about 50% or lower, about 55% or lower, about 60% or lower, about 70% or lower, about 80% or lower, or about 90% or lower relative to a level of expression of a target gene in a neuron. In some embodiments, the reduction in expression of a target gene in an astrocyte is relative to an amount or level of target gene expression in an oligodendrocytes contacted with the lipid-conjugated RNAi oligonucleotide. In some embodiments, the reduction in expression of a target gene in an astrocyte is about 1% or lower, about 5% or lower, about 10% or lower, about 15% or lower, about 20% or lower, about 25% or lower, about 30% or lower, about 35% or lower, about 40% or lower, about 45% or lower, about 50% or lower, about 55% or lower, about 60% or lower, about 70% or lower, about 80% or lower, or about 90% or lower relative to a level of target gene expression in an oligodendrocyte.

[0819] In some embodiments, reduction in expression of a target gene in a neuron is increased by at least 1%, at least 5%, at least 10%, at least 15%, at least 20%, at least 25%, at least 30%, at least 35%, at least 40%, at least 45%, at least 50%, at least 55%, at least 60%, at least 70%, at least 80%, or at least 90% relative to reduction in expression of the target gene in an astrocyte. In some embodiments, the reduction in expression of a target gene in an oligodendrocyte is increased by at least 1%, at least 5%, at least 10%, at least 15%, at least 20%, at least 25%, at least 30%, at least 35%, at least 40%, at least 45%, at least 50%, at least 55%, at least 60%, at least 70%, at least 80%, or at least 90% relative to reduction in expression of the target gene in an astrocyte.

[0820] In some embodiments, contacting or delivering a lipid-conjugated RNAi oligonucleotide described herein to a cell or a population of cells results in a reduction in expression of a target gene in an oligodendrocyte. In some embodiments, the reduction in oligodendrocyte target gene expression is relative to an amount or level of target gene expression in neurons contacted with the lipid-conjugated RNAi oligonucleotide. In some embodiments, the reduction in a target gene in an oligodendrocyte is about 1% or lower, about 5% or lower, about 10% or lower, about 15% or lower, about 20% or lower, about 25% or lower, about 30% or lower, about 35% or lower, about 40% or lower, about 45% or lower, about 50% or lower, about 55% or lower, about 60% or lower, about 70% or lower, about 80% or lower, or about 90% or lower relative to a level of target gene expression in a neuron. In some embodiments, the reduction in expression of a target gene in an oligodendrocyte is relative to an amount or level of expression of a target gene in an astrocyte contacted with the lipid-conjugated RNAi oligonucleotide. In some embodiments, the reduction in expression of a target gene in an oligodendrocyte is about 1% or lower, about 5% or lower, about 10% or lower, about 15% or lower, about 20% or lower, about 25% or lower, about 30% or lower, about 35% or lower, about 40% or lower, about 45% or lower, about 50% or lower, about 55% or lower, about 60% or lower, about 70% or lower, about 80% or lower, or about 90% or lower relative to a level of expression of a target gene in an astrocyte.

[0821] In some embodiments, reduction in expression of a target gene in a neuron is increased by at least 1%, at least 5%, at least 10%, at least 15%, at least 20%, at least 25%, at least 30%, at least 35%, at least 40%, at least 45%, at least 50%, at least 55%, at least 60%, at least 70%, at least 80%, or at least 90% relative to reduction in expression of the target gene in an oligodendrocyte. In some embodiments, the reduction in expression of a target gene in an astrocyte is increased by at least 1%, at least 5%, at least 10%, at least 15%, at least 20%, at least 25%, at least 30%, at least 35%, at least 40%, at least 45%, at least 50%, at least 55%, at least 60%, at least 70%, at least 80%, or at least 90% relative to reduction in expression of the target gene in an oligodendrocyte.

[0822] In some embodiments, contacting or delivering an oligonucleotide described herein to a cell or a population of cells results in a reduction in expression of a target gene in the CNS.

[0823] In some embodiments, differences in target mRNA expression between cell types or tissue types is measured using methods known in the art. In some embodiments, differences in target mRNA expression between cell types or tissue types measures the reduction of the target mRNA in a first cell/tissue type compared to the reduction of target mRNA in a second cell/tissue type.

[0824] For example, differences in target mRNA expression between cell types or tissue types is measured using polymerase chain reaction methods (e.g., RT-PCR) comparing relative expression between different tissue or cell types. In some embodiments, differences in target mRNA expression between cell types or tissue types is measured using Northern blot analysis, in situ hybridization, RT-PCR, RNA sequencing, or other methods known in the art. In some embodiments, a relative amount of target mRNA expression is compared between cell or tissue types. In some embodiments, an absolute amount of target mRNA expression is compared between cell or tissue types.

### Reducing Target Gene Expression in the Eye

[0825] In some embodiments, expression of a target gene is reduced in a region of the eye. In some embodiments, a region of the eye includes, but is not limited to, the optic nerve and retina.

[0826] In some embodiments, expression of a target gene in the ocular tissue of a subject is reduced by at least about 30%, about 35%, about 40%, about 45%, about 50%, about 55%, about 60%, about 65%, about 70%, about 75%, about 80%, about 85%, about 90%, about 95%, about 99% or greater than 99% when compared to target gene expression in other control tissue.

### Reducing Target Gene Expression in the Liver

[0827] In some embodiments, expression of a target gene is reduced in a cell of the liver. In some embodiments, a cell of the liver is a macrophage located in the liver. In some embodiments, expression of a target gene is reduced in a region of the liver.

[0828] In some embodiments, expression of a target gene in the liver of a subject is reduced by at least about 30%, about 35%, about 40%, about 45%, about 50%, about 55%, about 60%, about 65%, about 70%, about 75%, about 80%, about 85%, about 90%, about 95%, about 99% or greater than 99% when compared to target gene expression in other tissue.

### Reducing Target Gene Expression in Muscle Tissue

[0829] In some embodiments, expression of a target gene is reduced in a cell of muscle tissue (e.g., skeletal muscle). In some embodiments, expression of a target gene in a muscle tissue (e.g., skeletal muscle) of a subject is reduced by at least about 30%, about 35%, about 40%, about 45%, about 50%, about 55%, about 60%, about 65%, about 70%, about 75%, about 80%, about 85%, about 90%, about 95%, about 99% or greater than 99% when compared to target gene expression in other tissue.

### Reducing Target Gene Expression in Adipose Tissue

[0830] In some embodiments, expression of a target gene is reduced in a cell of adipose tissue. In some embodiments, expression of a target gene in adipose tissue of a subject is reduced by at least about 30%, about 35%, about 40%, about 45%, about 50%, about 55%, about 60%, about 65%, about 70%, about 75%, about 80%, about 85%, about 90%, about 95%, about 99% or greater than 99% when compared to target gene expression in other tissue.

### Reducing Target Gene Expression in Cardiac Tissue

[0831] In some embodiments, expression of a target gene is reduced in a cell of cardiac tissue. In some embodiments, expression of a target gene is reduced in a region of the heart. In some embodiments, expression of a target gene in cardiac tissue of a subject is reduced by at least about 30%, about 35%, about 40%, about 45%, about 50%, about 55%, about 60%, about 65%, about 70%, about 75%, about 80%, about 85%, about 90%, about 95%, about 99% or greater than 99% when compared to target gene expression in other tissue.

### Reducing Target Gene Expression in Lung Tissue

[0832] In some embodiments, expression of a target gene is reduced in a cell of lung tissue. In some embodiments, expression of a target gene is reduced in a region of a lung. In some embodiments, expression of a target gene in cardiac tissue of a subject is reduced by at least about 30%, about 35%, about 40%, about 45%, about 50%, about 55%, about 60%, about 65%, about 70%, about 75%, about 80%, about 85%, about 90%, about 95%, about 99% or greater than 99% when compared to target gene expression in other tissue.

### Treatment Methods

[0833] In some embodiments, the disclosure provides methods for treating a disease, disorder, or condition associated with expression of a target gene in one or more tissues or cells. In some embodiments, the disclosure provides methods for treating a disease, disorder, or condition associated with expression of a target gene in the CNS (e.g., neuronal gene). In some embodiments, the disclosure provides methods for treating a disease, disorder, or condition associated with expression of a target gene in ocular tissue. In some embodiments, the disclosure provides methods for treating a disease, disorder, or condition associated with expression of a target gene in the liver (e.g., macrophage target gene). In some embodiments, the disclosure provides methods for treating a disease, disorder, or condition associated with expression of a target gene in adipose tissue. In some embodiments, the disclosure provides methods for treating a disease, disorder, or condition associated with expression of a target gene in adrenal tissue. In some embodiments, the disclosure provides methods for treating a disease, disorder, or condition associated with expression of a target gene in skeletal muscle tissue. In some embodiments, the disclosure provides methods for treating a disease, disorder, or condition associated with expression of a target gene in lung tissue. In some embodiments, the disclosure provides methods for treating a disease, disorder, or condition associated with expression of a target gene in heart tissue.

[0834] Methods described herein are typically involve administering to a subject a therapeutically effective amount of a lipid-conjugated RNAi oligonucleotide herein, that is, an amount capable of producing a desirable therapeutic result. A therapeutically acceptable amount may be an amount that can therapeutically treat a disease or disorder. The appropriate dosage for any one subject will depend on certain factors, including the subject's size, body surface area, age, the composition to be administered, the active ingredient(s) in the composition, time and route of administration, general health, and other drugs being administered concurrently.

[0835] In some embodiments, a subject is administered any one of the compositions herein either enterally (e.g., orally, by gastric feeding tube, by duodenal feeding tube, via gastrostomy or rectally), parenterally (e.g., subcutaneous injection, intravenous injection or infusion, intra-arterial injection or infusion, intraosseous infusion, intramuscular injection, intracerebral injection, intracerebroventricular injection, intrathecal), topically (e.g., epicutaneous, inhalational, via eye drops, or through a mucous membrane), or by direct injection into a target organ (e.g., the brain of a subject).

[0836] In some embodiments, a lipid-conjugated RNAi oligonucleotide herein, or a composition thereof, is administered once every year, once every 6 months, once every 4 months, quarterly (once every three months), bi-monthly (once every two months), monthly or weekly. In some embodiments, a lipid-conjugated RNAi oligonucleotide herein, or a composition thereof, is administered every week or at intervals of two, or three weeks. In some embodiments, a lipid-conjugated RNAi oligonucleotide herein, or a composition thereof, is administered daily. In some embodiments, a subject is administered one or more loading doses of a lipid-conjugated RNAi oligonucleotide herein, or a composition thereof, followed by one or more maintenance doses of the lipid-conjugated RNAi oligonucleotide, or a composition thereof.

[0837] In some embodiments, the subject to be treated is a human or non-human primate or other mammalian subject. Other exemplary subjects include domesticated animals such as dogs and cats; livestock such as horses, cattle, pigs, sheep, goats, and chickens; and animals such as mice, rats, guinea pigs, and hamsters.

### Treatment Methods in the CNS

[0838] The disclosure provides oligonucleotides for use as a medicament, in particular for use in a method for the treatment of diseases, disorders, and conditions associated with the CNS. The disclosure also provides lipid-conjugated RNAi oligonucleotide s for use, or adaptable for use, to treat a subject (e.g., a human) having a disease, disorder or condition associated with expression of a target gene (e.g., neuronal gene) that would benefit from reducing expression of the target gene. In some embodiments, the disclosure provides lipid-conjugated RNAi oligonucleotides for use, or adapted for use, to treat a subject having a disease, disorder or condition associated with expression of a target gene in the CNS. The disclosure also provides lipid-conjugated RNAi oligonucleotides for use, or adaptable for use, in the manufacture of a medicament or pharmaceutical composition for treating a disease, disorder or condition associated with expression of a target gene in the CNS. In some embodiments, the lipid-conjugated RNAi oligonucleotides for use, or adaptable for use, target mRNA and reduce expression of a target gene in the CNS (e.g., via the RNAi pathway). In some embodiments, the lipid-conjugated RNAi oligonucleotides for use, or adaptable for use, target mRNA and reduce the amount or level of target mRNA, protein and/or activity.

[0839] In addition, in some embodiments of the methods herein, a subject having a disease, disorder or condition associated with expression of a target gene in the CNS or is predisposed to the same is selected for treatment with a lipid-conjugated RNAi oligonucleotide herein. In some embodiments, the method comprises selecting an individual having a marker (e.g., a biomarker) for a disease, disorder or condition associated with expression of a target gene in the CNS, or predisposed to the same, such as, but not limited to, target mRNA, protein, or a combination thereof. Likewise, and as detailed below, some embodiments of the methods provided by the disclosure include steps such as measuring or obtaining a baseline value for a marker of expression of a target gene in the CNS, and then comparing such obtained value to one or more other baseline values or values obtained after the subject is administered the lipid-conjugated RNAi oligonucleotide to assess the effectiveness of treatment.

[0840] The disclosure also provides methods of treating a subject having, suspected of having, or at risk of developing a disease, disorder or condition associated with expression of a target gene in the CNS e with a lipid-conjugated RNAi oligonucleotide provided herein. In some embodiments, the disclosure provides methods of treating or attenuating the onset or progression of a disease, disorder or condition associated with expression of a target gene in the CNS using the lipid-conjugated RNAi oligonucleotides provided herein. In some embodiments, the disclosure provides methods to achieve one or more therapeutic benefits in a subject having a disease, disorder or condition associated with expression of a target gene in the CNS using the lipid-conjugated RNAi oligonucleotides provided herein.

[0841] In some embodiments of the methods herein, the subject is treated by administering a therapeutically effective amount of any one or more of the lipid-conjugated RNAi oligonucleotides provided herein. In some embodiments, treatment comprises reducing expression of a target gene in the CNS (e.g., neuronal target gene). In some embodiments, the subject is treated therapeutically. In some embodiments, the subject is treated prophylactically.

[0842] In some embodiments of the methods herein, a lipid-conjugated RNAi oligonucleotide provided herein, or a pharmaceutical composition comprising the lipid-conjugated RNAi oligonucleotide, is administered to a subject having a disease, disorder or condition associated with expression of a target gene in the CNS (e.g., neuronal target gene) such that target gene expression is reduced in the subject, thereby treating the subject. In some embodiments, an amount or level of target mRNA is reduced in the subject. In some embodiments, an amount or level of protein encoded by the target mRNA is reduced in the subject.

[0843] In some embodiments of the methods herein, a lipid-conjugated RNAi oligonucleotide provided herein, or a pharmaceutical composition comprising the lipid-conjugated RNAi oligonucleotide, is administered to a subject having a disease, disorder or condition associated with expression of a target gene in the CNS (e.g., neuronal target gene) such that target gene expression is reduced in the subject by at least about 30%, about 35%, about 40%, about 45%, about 50%, about 55%, about 60%, about 65%, about 70%, about 75%, about 80%, about 85%, about 90%, about 95%, about 99% or greater than 99% when compared to target gene expression prior to administration of the lipid-conjugated RNAi oligonucleotide or pharmaceutical composition. In some embodiments, expression of a target gene in the CNS (e.g., neuronal target gene) is reduced in the subject by at least about 30%, about 35%, about 40%, about 45%, about 50%, about 55%, about 60%, about 65%, about 70%, about 75%, about 80%, about 85%, about 90%, about 95%, about 99% or greater than 99% when compared to target gene expression in a subject (e.g., a reference or control subject) not receiving the lipid-conjugated RNAi oligonucleotide or pharmaceutical composition or receiving a control lipid-conjugated RNAi oligonucleotide, pharmaceutical composition or treatment.

[0844] In some embodiments of the methods herein, an lipid-conjugated RNAi oligonucleotide herein, or a pharmaceutical composition comprising the lipid-conjugated RNAi oligonucleotide, is administered to a subject having a disease, disorder or condition associated with expression of a target gene in the CNS (e.g., neuronal target gene) such that an amount or level of target mRNA is reduced in the subject by at least about 30%, about 35%, about 40%, about 45%, about 50%, about 55%, about 60%, about 65%, about 70%, about 75%, about 80%, about 85%, about 90%, about 95%, about 99% or greater than 99% when compared to the amount or level of target mRNA prior to administration of the lipid-conjugated RNAi oligonucleotide or pharmaceutical composition. In some embodiments, an amount or level of target mRNA is reduced in the subject by at least about 30%, about 35%, about 40%, about 45%, about 50%, about 55%, about 60%, about 65%, about 70%, about 75%, about 80%, about 85%, about 90%, about 95%, about 99% or greater than 99% when compared to an amount or level of target mRNA in a subject (e.g., a reference or control subject) not receiving the lipid-conjugated RNAi oligonucleotide or pharmaceutical composition or receiving a control lipid-conjugated RNAi oligonucleotide, pharmaceutical composition or treatment.

[0845] In some embodiments of the methods herein, a lipid-conjugated RNAi oligonucleotide herein, or a pharmaceutical composition comprising the lipid-conjugated RNAi oligonucleotide, is administered to a subject having a disease, disorder or condition associated with expression of a target gene in the CNS (e.g., neuronal target gene) such that an amount or level of protein encoded by the target gene is reduced in the subject by at least about 30%, about 35%, about 40%, about 45%, about 50%, about 55%, about 60%, about 65%, about 70%, about 75%, about 80%, about 85%, about 90%, about 95%, about 99% or greater than 99% when compared to the amount or level of protein encoded by the target gene prior to administration of the lipid-conjugated RNAi oligonucleotide or pharmaceutical composition. In some embodiments, an amount or level of protein encoded by a target gene in the CNS (e.g., neuronal target gene) is reduced in the subject by at least about 30%, about 35%, about 40%, about 45%, about 50%, about 55%, about 60%, about 65%, about 70%, about 75%, about 80%, about 85%, about 90%, about 95%, about 99% or greater than 99% when compared to an amount or level of protein encoded by the target gene in a subject (e.g., a reference or control subject) not receiving the lipid-conjugated RNAi oligonucleotide or pharmaceutical composition or receiving a control lipid-conjugated RNAi oligonucleotide, pharmaceutical composition or treatment.

[0846] In some embodiments of the methods herein, a lipid-conjugated RNAi oligonucleotide herein, or a pharmaceutical composition comprising the lipid-conjugated RNAi oligonucleotide, is administered to a subject having a disease, disorder or condition associated with expression of a target gene in the CNS (e.g., neuronal target gene) such that an amount or level of target gene activity is reduced in the subject by at least about 30%, about 35%, about 40%, about 45%, about 50%, about 55%, about 60%, about 65%, about 70%, about 75%, about 80%, about 85%, about 90%, about 95%, about 99% or greater than 99% when compared to the amount or level of target gene activity prior to administration of the lipid-conjugated RNAi oligonucleotide or pharmaceutical composition. In some embodiments, an amount or level of target gene activity is reduced in the subject by at least about 30%, about 35%, about 40%, about 45%, about 50%, about 55%, about 60%, about 65%, about 70%, about 75%, about 80%, about 85%, about 90%, about 95%, about 99% or greater than 99% when compared to an amount or level of target gene activity in a subject (e.g., a reference or control subject) not receiving the lipid-conjugated RNAi oligonucleotide or pharmaceutical composition or receiving a control lipid-conjugated RNAi oligonucleotide, pharmaceutical composition or treatment.

[0847] Suitable methods for determining target gene expression, an amount or level of target mRNA, an amount or level of protein encoded by the target gene, and/or an amount or level of target gene activity, in the subject, or in a sample from the subject, are known in the art. Further, the Examples set forth herein illustrate exemplary methods for determining target gene expression.

[0848] In some embodiments, target gene expression, an amount or level of target gene mRNA, an amount or level of protein encoded by a target gene, an amount or level of target gene activity, or any combination thereof, is reduced in a cell (e.g., a neuron), a population or a group of cells (e.g., an organoid), an organ (e.g., CNS), blood or a fraction thereof (e.g., plasma), a tissue (e.g., brain tissue), a sample (e.g., CSF sample or a brain biopsy sample), or any other biological material obtained or isolated from the subject. In some embodiments, expression of a target gene in the CNS (e.g., neuronal target gene), an amount or level of target gene mRNA, an amount or level of protein encoded by the target gene, an amount or level of target gene activity, or any combination thereof, is reduced in more than one type of cell (e.g., neuron), more than one groups of cells, more than one organ (e.g., brain and one or more other organ(s)), more than one fraction of blood (e.g., plasma and one or more other blood fraction(s)), more than one type of tissue (e.g., brain tissue and one or more other type(s) of tissue), more than one type of sample (e.g., a brain biopsy sample and one or more other type(s) of biopsy sample) obtained or isolated from the subject.

[0849] In some embodiments, expression of a target mRNA is reduced in one or more of astrocytes, neurons, or oligodendrocytes. In some embodiments, expression of a target mRNA is reduced in astrocytes. In some embodiments, expression of a target mRNA is reduced in neurons. In some embodiments, expression of a target mRNA is reduced in oligodendrocytes. In some embodiments, expression of a target mRNA is reduced in astrocytes and neurons. In some embodiments, expression of a target mRNA is reduced in astrocytes and oligodendrocytes. In some embodiments, expression of a target mRNA is reduced in neurons and oligodendrocytes. In some embodiments, expression of a target mRNA is reduced in astrocytes, oligodendrocytes, and neurons.

[0850] In some embodiments, expression of a target gene in the CNS (e.g., neuronal target gene) is reduced in one or more of the spinal cord, lumbar dorsal root ganglion (DRG), medulla, hippocampus, frontal cortex, brainstem, or cerebellum. In some embodiments, expression of a target gene in the CNS (e.g., neuronal target gene) is reduced in one or more of the spinal cord, lumbar spinal cord, thoracic spinal cord, cervical spinal cord, lumbar dorsal root ganglion (DRG), medulla, hippocampus, frontal cortex, brainstem, hypothalamus, or cerebellum. In some embodiments, expression of a target gene in the CNS (e.g., neuronal target gene) is reduced in the spinal cord. In some embodiments, expression of a target gene in the CNS (e.g., neuronal target gene) is reduced in the lumbar spinal cord. In some embodiments, expression of a target gene in the CNS (e.g., neuronal target gene) is reduced in the thoracic spinal cord. In some embodiments, expression of a target gene in the CNS (e.g., neuronal target gene) is reduced in the cervical spinal cord. In some embodiments, expression of a target gene in the CNS (e.g., neuronal target gene) is reduced in lumbar dorsal root ganglion. In some embodiments, expression of a target gene in the CNS (e.g., neuronal target gene) is reduced in the medulla. In some embodiments, expression of a target gene in the CNS (e.g., neuronal target gene) is reduced in the hippocampus. In some embodiments, expression of a target gene in the CNS (e.g., neuronal target gene) is reduced in the frontal cortex. In some embodiments, expression of a target gene in the CNS (e.g., neuronal target gene) is reduced in the brainstem. In some embodiments, expression of a target gene in the CNS (e.g., neuronal target gene) is reduced in the hypothalamus. In some embodiments, expression of a target gene in the CNS (e.g., neuronal target gene) is reduced in the cerebellum.

[0851] In some embodiments, the disclosure provides a method of reducing expression of a target mRNA in an astrocyte, comprising administering a blunt-end double-stranded oligonucleotide wherein the oligonucleotide comprises:
[0852] (i) a sense strand, wherein the sense strand is 20 nucleotides in length, wherein the sense strand comprises at least one lipid moiety conjugated to the 5′ terminus, and wherein the sense strand comprises at least one locked nucleic acid, and
[0853] (ii) an antisense strand, wherein the antisense strand is 22 nucleotides in length, and wherein the antisense strand comprises a region of complementarity to the target mRNA in the astrocyte, and
[0854] wherein the sense and antisense strand are separate strands which form an asymmetric duplex region having an overhang of 2 nucleotides at the 3′ terminus of the antisense strand, wherein the duplex region is 20 nucleotides, and
[0855] wherein the oligonucleotide does not reduce the target mRNA in a neuron to the same amount as reduction in the astrocyte.

[0856] In some embodiments, the disclosure provides a method of reducing expression of a target mRNA in an astrocyte, comprising administering a double-stranded oligonucleotide wherein the oligonucleotide comprises:
[0857] (i) a sense strand, wherein the sense strand is 14 nucleotides in length, wherein the sense strand comprises at least one lipid moiety conjugated to the 5′ terminus, and wherein the sense strand comprises at least one locked nucleic acid, and
[0858] (ii) an antisense strand, wherein the antisense strand is 22 nucleotides in length, and wherein the antisense strand comprises a region of complementarity to the target mRNA in the astrocyte, and
[0859] wherein the sense and antisense strand are separate strands which form an asymmetric duplex region having an overhang of 8 nucleotides at the 3′ terminus of the antisense strand, wherein the duplex region is 14 nucleotides,
[0860] wherein the oligonucleotide does not reduce target mRNA in an oligodendrocyte to the same or similar amount as reduction in the astrocyte.

[0861] In some embodiments, the disclosure provides a method of reducing expression of a target mRNA in an astrocyte and an oligodendrocyte to the same or similar amount, comprising administering a double-stranded oligonucleotide wherein the oligonucleotide comprises:
[0862] (i) a sense strand, wherein the sense strand is 20 nucleotides in length, wherein the sense strand comprises at least one lipid moiety conjugated to the 5′ terminus, and wherein the sense strand comprises at least one locked nucleic acid, and
[0863] (ii) an antisense strand, wherein the antisense strand is 22 nucleotides in length, and wherein the antisense strand comprises a region of complementarity to the target mRNA in the astrocyte and oligodendrocyte, and
[0864] wherein the sense and antisense strand are separate strands which form an asymmetric duplex region having an overhang of 2 nucleotides at the 3′ terminus of the antisense strand, wherein the duplex region is 20 nucleotides, thereby reducing expression of the target mRNA in the astrocyte and oligodendrocyte to the same or similar amount.

[0865] In some embodiments, the disclosure provides a method of reducing expression of a target mRNA in an astrocyte and a neuron, comprising administering a double-stranded oligonucleotide wherein the oligonucleotide comprises:
[0866] (i) a sense strand, wherein the sense strand is 14 nucleotides in length, wherein the sense strand comprises at least one lipid moiety conjugated to the 5′ terminus, and wherein the sense strand comprises at least one locked nucleic acid, and
[0867] (ii) an antisense strand, wherein the antisense strand is 22 nucleotides in length, and wherein the antisense strand comprises a region of complementarity to the target mRNA in the astrocyte and neuron, and
[0868] wherein the sense and antisense strand are separate strands which form an asymmetric duplex region having an overhang of 8 nucleotides at the 3′ terminus of the antisense strand, wherein the duplex region is 14 nucleotides,
[0869] wherein the oligonucleotide does not reduce the target mRNA in an oligodendrocyte to the same amount as reducing in the astrocyte and neuron.

[0870] In some embodiments, the disclosure provides a method of reducing expression of a target mRNA in a neuron, comprising administering a double-stranded oligonucleotide wherein the oligonucleotide comprises:
[0871] (i) a sense strand, wherein the sense strand is 14 nucleotides in length, wherein the sense strand comprises at least one lipid moiety conjugated to the 5′ terminus, and wherein the sense strand comprises at least one locked nucleic acid but no more than 5 locked nucleic acids, and
[0872] (ii) an antisense strand, wherein the antisense strand is 22 nucleotides in length, and wherein the antisense strand comprises a region of complementarity to the target mRNA in the neuron, and
[0873] wherein the sense and antisense strand are separate strands which form an asymmetric duplex region having an overhang of about 8 nucleotides at the 3′ terminus of the antisense strand, wherein the duplex region is about 14 nucleotides.

[0874] In some embodiments, the disclosure provides a method of reducing expression of a target mRNA in a neuron, comprising administering a double-stranded oligonucleotide wherein the oligonucleotide comprises:
[0875] (i) a sense strand, wherein the sense strand is 14 nucleotides in length, wherein the sense strand comprises at least one lipid moiety conjugated to the 5′ terminus, and wherein the sense strand comprises at least one locked nucleic acid, and
[0876] (ii) an antisense strand, wherein the antisense strand is 22 nucleotides in length, and wherein the antisense strand comprises a region of complementarity to the target mRNA in the neuron, and
[0877] wherein the sense and antisense strand are separate strands which form an asymmetric duplex region having an overhang of about 8 nucleotides at the 3′ terminus of the antisense strand, wherein the duplex region is about 14 nucleotides, wherein the oligonucleotide does not reduce the target mRNA in an oligodendrocyte to the same amount as reducing in the neuron.

[0878] In some embodiments, the disclosure provides a method of reducing expression of a target mRNA in a neuron in the lumbar dorsal root ganglion (DRG), comprising administering a double-stranded oligonucleotide wherein the oligonucleotide comprises:
[0879] (i) a sense strand, wherein the sense strand is 26 nucleotides in length, wherein the sense strand comprises a stem-loop comprising a lipid moiety conjugated to the stem-loop, and wherein the sense strand comprises a locked nucleic acid at the 5′ terminus, and
[0880] (ii) an antisense strand, wherein the antisense strand is 22 nucleotides in length, wherein the antisense strand comprises a phosphorothioate linkage between position 1 and 2, position 2 and 3, position 3 and 4, position 12 and 13, position 13 and 14, position 14 and 15, position 15 and 16, position 16 and 17, position 17 and 18, position 18 and 19, position 19 and 20, position 20 and 21, and position 21 and 22, and wherein the antisense strand comprises a region of complementarity to the target mRNA in the neuron, and
[0881] wherein the sense and antisense strand are separate strands which form an asymmetric duplex region having an overhang of about 8 nucleotides at the 3′ terminus of the antisense strand, wherein the duplex region is about 14 nucleotides.

[0882] Examples of a disease, disorder or condition associated with expression of a target gene in the CNS (e.g., neuronal target gene), but are not limited to, Pelizacus-Merzbacher Disease, Spinal Cord Injury & Stroke, Krabbe Disease, Metachromatic Leukodystrophy, Adult-Onset Leukodystrophy, Multiple Sclerosis, X-linked Adrenoleukodystrophy, Progressive Supranuclear Palsy (PSP), Corticobasal degeneration (CBD), Argyrophilic grain disease (AGD), Globular glial tauopathy (GGT), Ageing-related tau astrogliopathy (ARTAG), Familial Frontotemporal Dementia 17 (FTD-17), Tauopathy with Respiratory Failure, Dementia with Seizures, Pick's disease, Myotonic dystrophy 1 or 2 (MDI or MD2), Down's syndrome, Spastic Paraplegia (SP), Niemann-Pick disease type C, Dementia with Lewy bodies (DLB), Lewy body dysphagia, Lewy body disease, Olivopontocerebellar atrophy, Striatonigral degeneration, Shy-Drager syndrome, Spinal muscular atrophy V (SMAV), Huntington's Disease (HD), Alzheimer's Disease, SCA1, SCA2, SCA3, SCA7, SCA10 (spinocerebellar ataxia type 1, 2, 3, 7 or 10), Multiple System Atrophy (MSA), Spinal and Bulbar Muscular Atrophy (SBMA, Kennedy disease), Friedrich Ataxia, Fragile X-associated tremor/ataxia syndrome (FXTAS), Fragile X syndrome (FRAXA), X-Linked Mental Retardation (XLMR), Parkinson's Disease, Dystonia, SBMA (spinobulbar muscular atrophy), spinal cord injury, Dentatorubral-pallidoluysian atrophy (DRPLA), recessive CNS disorders, ALS (amyotrophic lateral sclerosis), M2DS (MECP2 duplication syndrome), FTD (frontotemporal dementia), Prion disease, Adult Onset Leukodystrophy, Alexander's Disease, Krabbe Disease, Chronic Traumatic Encephalopathy, Pelizacus-Merzbacher disease (PMD), Lafora disease, stroke, Cerebral Amyloid Angiopathy (CAA), and Metachromatic Leukodystrophy (MLD).

[0883] In some embodiments, the target gene in the CNS (e.g., neuronal target gene) may be a target gene from any mammal, such as a human. Any target gene in the CNS (e.g., neuronal target gene) may be silenced according to the method described herein.

[0884] In some embodiments, a lipid-conjugated RNAi oligonucleotide herein, or a composition thereof, is administered intrathecally into cerebrospinal fluid (CSF) (e.g., injection or infusion into the fluid within the subarachnoid space). In some embodiments, intrathecal administration of a lipid-conjugated RNAi oligonucleotide herein, or a composition thereof, is performed as a bolus injection into the subarachnoid space. In some embodiments, intrathecal administration of a lipid-conjugated RNAi oligonucleotide herein, or a composition thereof, is performed as an infusion into the subarachnoid space. In some embodiments, intrathecal administration of a herein, or a composition thereof, is performed via a catheter into the subarachnoid space. In some embodiments, intrathecal administration of a lipid-conjugated RNAi oligonucleotide herein, or a composition thereof, is performed via a pump. In some embodiments, intrathecal administration of a lipid-conjugated RNAi oligonucleotide herein, or a composition thereof, is performed via an implantable pump. In some embodiments, administration is performed via an implantable device that operates or functions a reservoir.

[0885] In some embodiments, a lipid-conjugated RNAi oligonucleotide herein, or a composition thereof, is administered intrathecally into the cerebellomedullary cistern (also referred to as the cisterna magna). Intrathecal administration into the cisterna magna is referred to as “intracisternal administration” or “intracisternal magna (i.c.m.) administration). In some embodiments, a lipid-conjugated RNAi oligonucleotide herein, or composition thereof, is administered intrathecally into the subarachnoid space of the lumbar spinal cord. Intrathecal administration into the subarachnoid space of the lumbar spinal cord is referred to as “lumbar intrathecal (i.t.) administration”. In some embodiments, a lipid-conjugated RNAi oligonucleotide herein, or composition thereof, is administered intrathecally into the subarachnoid space of the cervical spinal cord. Intrathecal administration into the subarachnoid space of the cervical spinal cord is referred to as “cervical intrathecal (i.t.) administration”. In some embodiments, a lipid-conjugated RNAi oligonucleotide herein, or composition thereof, is administered intrathecally into the subarachnoid space of the thoracic spinal cord. Intrathecal administration into the subarachnoid space of the thoracic spinal cord is referred to as “thoracic intrathecal (i.t.) administration”. In some embodiments, a lipid-conjugated RNAi oligonucleotide herein, or composition thereof, is administered by intracerebroventricular injection or infusion into the cerebral ventricles. Intracerebroventricular administration into the ventricular space is referred to as “intracerebroventricular (i.c.v.) administration”. In some embodiments, an Ommaya reservoir is used to administer a lipid-conjugated RNAi oligonucleotide herein, or composition thereof, by intracerebroventricular injection or infusion.

[0886] In some embodiments, a lipid-conjugated RNAi oligonucleotide herein, or a composition thereof, is administered via ophthalmic, intraocular, subconjunctival, intravitreal, retrobulbar, or intracameral administration.

[0887] In some embodiments, a lipid-conjugated RNAi oligonucleotide herein, or a composition thereof, is administered via epidural administration.

### Treatment Methods in Ocular Tissue

[0888] The disclosure provides oligonucleotides for use as a medicament, in particular for use in a method for the treatment of diseases, disorders, and conditions associated with ocular tissue. The disclosure also provides oligonucleotide s for use, or adaptable for use, to treat a subject (e.g., a human) having a disease, disorder or condition associated with expression of an ocular target gene that would benefit from reducing expression of the ocular target gene. In some embodiments, the disclosure provides oligonucleotides for use, or adapted for use, to treat a subject having a disease, disorder or condition associated with ocular target gene expression. The disclosure also provides oligonucleotides for use, or adaptable for use, in the manufacture of a medicament or pharmaceutical composition for treating a disease, disorder or condition associated with expression of an ocular target gene. In some embodiments, the oligonucleotides for use, or adaptable for use, target mRNA and reduce expression of an ocular target gene (e.g., via the RNAi pathway). In some embodiments, the oligonucleotides for use, or adaptable for use, target mRNA and reduce the amount or level of ocular target mRNA, protein and/or activity.

[0889] In addition, in some embodiments of the methods herein, a subject having a disease, disorder or condition associated with expression of an ocular target gene or is predisposed to the same is selected for treatment with an oligonucleotide herein. In some embodiments, the method comprises selecting an individual having a marker (e.g., a biomarker) for a disease, disorder or condition associated with expression of an ocular target gene, or predisposed to the same, such as, but not limited to, target mRNA, protein, or a combination thereof. Likewise, and as detailed below, some embodiments of the methods provided by the disclosure include steps such as measuring or obtaining a baseline value for a marker of expression of an ocular target gene, and then comparing such obtained value to one or more other baseline values or values obtained after the subject is administered the oligonucleotide to assess the effectiveness of treatment.

[0890] The disclosure also provides methods of treating a subject having, suspected of having, or at risk of developing a disease, disorder or condition associated with expression of an ocular target gene with an oligonucleotide provided herein. In some embodiments, the disclosure provides methods of treating or attenuating the onset or progression of a disease, disorder or condition associated with expression of an ocular target gene using the oligonucleotides provided herein. In some embodiments, the disclosure provides methods to achieve one or more therapeutic benefits in a subject having a disease, disorder or condition associated with expression of an ocular target gene using the oligonucleotides provided herein.

[0891] In some embodiments of the methods herein, the subject is treated by administering a therapeutically effective amount of any one or more of the oligonucleotides provided herein. In some embodiments, treatment comprises reducing expression of an ocular target gene. In some embodiments, the subject is treated therapeutically. In some embodiments, the subject is treated prophylactically.

[0892] In some embodiments of the methods herein, an oligonucleotide provided herein, or a pharmaceutical composition comprising the oligonucleotide, is administered to a subject having a disease, disorder or condition associated with expression of an ocular target gene such that target gene expression is reduced in the subject, thereby treating the subject. In some embodiments, an amount or level of target mRNA is reduced in the subject. In some embodiments, an amount or level of protein encoded by the target mRNA is reduced in the subject.

[0893] In some embodiments of the methods herein, an oligonucleotide provided herein, or a pharmaceutical composition comprising the oligonucleotide, is administered to a subject having a disease, disorder or condition associated with expression of an ocular target gene such that target gene expression is reduced in the subject by at least about 30%, about 35%, about 40%, about 45%, about 50%, about 55%, about 60%, about 65%, about 70%, about 75%, about 80%, about 85%, about 90%, about 95%, about 99% or greater than 99% when compared to target gene expression prior to administration of the oligonucleotide or pharmaceutical composition. In some embodiments, expression of an ocular target gene is reduced in the subject by at least about 30%, about 35%, about 40%, about 45%, about 50%, about 55%, about 60%, about 65%, about 70%, about 75%, about 80%, about 85%, about 90%, about 95%, about 99% or greater than 99% when compared to target gene expression in a subject (e.g., a reference or control subject) not receiving the oligonucleotide or pharmaceutical composition or receiving a control oligonucleotide, pharmaceutical composition or treatment.

[0894] In some embodiments of the methods herein, an oligonucleotide herein, or a pharmaceutical composition comprising the oligonucleotide, is administered to a subject having a disease, disorder or condition associated with expression of an ocular target gene such that an amount or level of target mRNA is reduced in the subject by at least about 30%, about 35%, about 40%, about 45%, about 50%, about 55%, about 60%, about 65%, about 70%, about 75%, about 80%, about 85%, about 90%, about 95%, about 99% or greater than 99% when compared to the amount or level of target mRNA prior to administration of the oligonucleotide or pharmaceutical composition. In some embodiments, an amount or level of target mRNA is reduced in the subject by at least about 30%, about 35%, about 40%, about 45%, about 50%, about 55%, about 60%, about 65%, about 70%, about 75%, about 80%, about 85%, about 90%, about 95%, about 99% or greater than 99% when compared to an amount or level of target mRNA in a subject (e.g., a reference or control subject) not receiving the oligonucleotide or pharmaceutical composition or receiving a control oligonucleotide, pharmaceutical composition or treatment.

[0895] In some embodiments of the methods herein, an oligonucleotide herein, or a pharmaceutical composition comprising the oligonucleotide, is administered to a subject having a disease, disorder or condition associated with expression of an ocular target gene such that an amount or level of protein encoded by the ocular target gene is reduced in the subject by at least about 30%, about 35%, about 40%, about 45%, about 50%, about 55%, about 60%, about 65%, about 70%, about 75%, about 80%, about 85%, about 90%, about 95%, about 99% or greater than 99% when compared to the amount or level of protein encoded by the target gene prior to administration of the oligonucleotide or pharmaceutical composition. In some embodiments, an amount or level of protein encoded by an ocular target gene is reduced in the subject by at least about 30%, about 35%, about 40%, about 45%, about 50%, about 55%, about 60%, about 65%, about 70%, about 75%, about 80%, about 85%, about 90%, about 95%, about 99% or greater than 99% when compared to an amount or level of protein encoded by the target gene in a subject (e.g., a reference or control subject) not receiving the oligonucleotide or pharmaceutical composition or receiving a control oligonucleotide, pharmaceutical composition or treatment.

[0896] In some embodiments of the methods herein, an oligonucleotide herein, or a pharmaceutical composition comprising the oligonucleotide, is administered to a subject having a disease, disorder or condition associated with expression of an ocular target gene such that an amount or level of target gene activity is reduced in the subject by at least about 30%, about 35%, about 40%, about 45%, about 50%, about 55%, about 60%, about 65%, about 70%, about 75%, about 80%, about 85%, about 90%, about 95%, about 99% or greater than 99% when compared to the amount or level of target gene activity prior to administration of the oligonucleotide or pharmaceutical composition. In some embodiments, an amount or level of target gene activity is reduced in the subject by at least about 30%, about 35%, about 40%, about 45%, about 50%, about 55%, about 60%, about 65%, about 70%, about 75%, about 80%, about 85%, about 90%, about 95%, about 99% or greater than 99% when compared to an amount or level of target gene activity in a subject (e.g., a reference or control subject) not receiving the oligonucleotide or pharmaceutical composition or receiving a control oligonucleotide, pharmaceutical composition or treatment.

[0897] Suitable methods for determining target gene expression, an amount or level of target mRNA, an amount or level of protein encoded by the target gene, and/or an amount or level of target gene activity, in the subject, or in a sample from the subject, are known in the art. Further, the Examples set forth herein illustrate exemplary methods for determining target gene expression.

[0898] In some embodiments, target gene expression, an amount or level of target gene mRNA, an amount or level of protein encoded by a target gene, an amount or level of target gene activity, or any combination thereof, is reduced in a cell (e.g., a retinal cell), a population or a group of cells (e.g., an organoid), an organ (e.g., ocular), blood or a fraction thereof (e.g., plasma), a tissue (e.g., ocular tissue), a sample (e.g., an ocular biopsy sample), or any other biological material obtained or isolated from the subject. In some embodiments, expression of an ocular target gene, an amount or level of target gene mRNA, an amount or level of protein encoded by the target gene, an amount or level of target gene activity, or any combination thereof, is reduced in more than one type of cell (e.g., a retinal cell), more than one groups of cells, more than one organ (e.g., ocular and one or more other organ(s)), more than one fraction of blood (e.g., plasma and one or more other blood fraction(s)), more than one type of tissue (e.g., ocular tissue and one or more other type(s) of tissue), more than one type of sample (e.g., an ocular biopsy sample and one or more other type(s) of biopsy sample) obtained or isolated from the subject.

[0899] In some embodiments, the ocular target gene may be a target gene from any mammal, such as a human. Any ocular gene may be silenced according to the method described herein.

[0900] In some embodiments, an oligonucleotide herein, or a composition thereof, is administered via ophthalmic, intraocular, subconjunctival, intravitreal, retrobulbar, or intracameral administration.

### Treatment Methods in the Liver

[0901] The disclosure provides oligonucleotides for use as a medicament, in particular for use in a method for the treatment of diseases, disorders, and conditions associated with the liver. The disclosure also provides oligonucleotides for use, or adaptable for use, to treat a subject (e.g., a human) having a disease, disorder or condition associated with expression of a liver target gene (e.g., liver macrophage target gene) that would benefit from reducing expression of the liver target gene. In some embodiments, the disclosure provides oligonucleotides for use, or adapted for use, to treat a subject having a disease, disorder or condition associated with liver target gene (e.g., liver macrophage target gene) expression. The disclosure also provides oligonucleotides for use, or adaptable for use, in the manufacture of a medicament or pharmaceutical composition for treating a disease, disorder or condition associated with expression of a liver target gene (e.g., liver macrophage target gene). In some embodiments, the oligonucleotides for use, or adaptable for use, target mRNA and reduce expression of a liver target gene (e.g., via the RNAi pathway). In some embodiments, the oligonucleotides for use, or adaptable for use, target mRNA and reduce the amount or level of liver target mRNA, protein and/or activity.

[0902] In addition, in some embodiments of the methods herein, a subject having a disease, disorder or condition associated with expression of a liver target gene (e.g., liver macrophage target gene) or is predisposed to the same is selected for treatment with an oligonucleotide herein. In some embodiments, the method comprises selecting an individual having a marker (e.g., a biomarker) for a disease, disorder or condition associated with expression of a liver target gene (e.g., liver macrophage target gene), or predisposed to the same, such as, but not limited to, target mRNA, protein, or a combination thereof. Likewise, and as detailed below, some embodiments of the methods provided by the disclosure include steps such as measuring or obtaining a baseline value for a marker of expression of a liver target gene, and then comparing such obtained value to one or more other baseline values or values obtained after the subject is administered the oligonucleotide to assess the effectiveness of treatment.

[0903] The disclosure also provides methods of treating a subject having, suspected of having, or at risk of developing a disease, disorder or condition associated with expression of a liver target gene with an oligonucleotide provided herein. In some embodiments, the disclosure provides methods of treating or attenuating the onset or progression of a disease, disorder or condition associated with expression of a liver target gene (e.g., liver macrophage target gene) using the oligonucleotides provided herein. In some embodiments, the disclosure provides methods to achieve one or more therapeutic benefits in a subject having a disease, disorder or condition associated with expression of a liver target gene (e.g., liver macrophage target gene) using the oligonucleotides provided herein.

[0904] In some embodiments of the methods herein, the subject is treated by administering a therapeutically effective amount of any one or more of the oligonucleotides provided herein. In some embodiments, treatment comprises reducing expression of a liver target gene (e.g., liver macrophage target gene). In some embodiments, the subject is treated therapeutically. In some embodiments, the subject is treated prophylactically.

[0905] In some embodiments of the methods herein, an oligonucleotide provided herein, or a pharmaceutical composition comprising the oligonucleotide, is administered to a subject having a disease, disorder or condition associated with expression of a liver target gene (e.g., liver macrophage target gene) such that target gene expression is reduced in the subject, thereby treating the subject. In some embodiments, an amount or level of target mRNA is reduced in the subject. In some embodiments, an amount or level of protein encoded by the target mRNA is reduced in the subject.

[0906] In some embodiments of the methods herein, an oligonucleotide provided herein, or a pharmaceutical composition comprising the oligonucleotide, is administered to a subject having a disease, disorder or condition associated with expression of a liver target gene (e.g., liver macrophage target gene) such that target gene expression is reduced in the subject by at least about 30%, about 35%, about 40%, about 45%, about 50%, about 55%, about 60%, about 65%, about 70%, about 75%, about 80%, about 85%, about 90%, about 95%, about 99% or greater than 99% when compared to target gene expression prior to administration of the oligonucleotide or pharmaceutical composition. In some embodiments, expression of a liver target gene (e.g., liver macrophage target gene) is reduced in the subject by at least about 30%, about 35%, about 40%, about 45%, about 50%, about 55%, about 60%, about 65%, about 70%, about 75%, about 80%, about 85%, about 90%, about 95%, about 99% or greater than 99% when compared to target gene expression in a subject (e.g., a reference or control subject) not receiving the oligonucleotide or pharmaceutical composition or receiving a control oligonucleotide, pharmaceutical composition or treatment.

[0907] In some embodiments of the methods herein, an oligonucleotide herein, or a pharmaceutical composition comprising the oligonucleotide, is administered to a subject having a disease, disorder or condition associated with expression of a liver target gene (e.g., liver macrophage target gene) such that an amount or level of target mRNA is reduced in the subject by at least about 30%, about 35%, about 40%, about 45%, about 50%, about 55%, about 60%, about 65%, about 70%, about 75%, about 80%, about 85%, about 90%, about 95%, about 99% or greater than 99% when compared to the amount or level of target mRNA prior to administration of the oligonucleotide or pharmaceutical composition. In some embodiments, an amount or level of target mRNA is reduced in the subject by at least about 30%, about 35%, about 40%, about 45%, about 50%, about 55%, about 60%, about 65%, about 70%, about 75%, about 80%, about 85%, about 90%, about 95%, about 99% or greater than 99% when compared to an amount or level of target mRNA in a subject (e.g., a reference or control subject) not receiving the oligonucleotide or pharmaceutical composition or receiving a control oligonucleotide, pharmaceutical composition or treatment.

[0908] In some embodiments of the methods herein, an oligonucleotide herein, or a pharmaceutical composition comprising the oligonucleotide, is administered to a subject having a disease, disorder or condition associated with expression of a liver target gene (e.g., liver macrophage target gene) such that an amount or level of protein encoded by the liver target gene is reduced in the subject by at least about 30%, about 35%, about 40%, about 45%, about 50%, about 55%, about 60%, about 65%, about 70%, about 75%, about 80%, about 85%, about 90%, about 95%, about 99% or greater than 99% when compared to the amount or level of protein encoded by the target gene prior to administration of the oligonucleotide or pharmaceutical composition. In some embodiments, an amount or level of protein encoded by a liver target gene (e.g., liver macrophage target gene) is reduced in the subject by at least about 30%, about 35%, about 40%, about 45%, about 50%, about 55%, about 60%, about 65%, about 70%, about 75%, about 80%, about 85%, about 90%, about 95%, about 99% or greater than 99% when compared to an amount or level of protein encoded by the target gene in a subject (e.g., a reference or control subject) not receiving the oligonucleotide or pharmaceutical composition or receiving a control oligonucleotide, pharmaceutical composition or treatment.

[0909] In some embodiments of the methods herein, an oligonucleotide herein, or a pharmaceutical composition comprising the oligonucleotide, is administered to a subject having a disease, disorder or condition associated with expression of a liver target gene (e.g., liver macrophage target gene) such that an amount or level of target gene activity is reduced in the subject by at least about 30%, about 35%, about 40%, about 45%, about 50%, about 55%, about 60%, about 65%, about 70%, about 75%, about 80%, about 85%, about 90%, about 95%, about 99% or greater than 99% when compared to the amount or level of target gene activity prior to administration of the oligonucleotide or pharmaceutical composition. In some embodiments, an amount or level of target gene activity is reduced in the subject by at least about 30%, about 35%, about 40%, about 45%, about 50%, about 55%, about 60%, about 65%, about 70%, about 75%, about 80%, about 85%, about 90%, about 95%, about 99% or greater than 99% when compared to an amount or level of target gene activity in a subject (e.g., a reference or control subject) not receiving the oligonucleotide or pharmaceutical composition or receiving a control oligonucleotide, pharmaceutical composition or treatment.

[0910] Suitable methods for determining target gene expression, an amount or level of target mRNA, an amount or level of protein encoded by the target gene, and/or an amount or level of target gene activity, in the subject, or in a sample from the subject, are known in the art. Further, the Examples set forth herein illustrate exemplary methods for determining target gene expression.

[0911] In some embodiments, target gene expression, an amount or level of target gene mRNA, an amount or level of protein encoded by a target gene, an amount or level of target gene activity, or any combination thereof, is reduced in a cell (e.g., a liver macrophage), a population or a group of cells (e.g., an organoid), an organ (e.g., liver), blood or a fraction thereof (e.g., plasma), a tissue (e.g., liver tissue), a sample (e.g., liver biopsy sample), or any other biological material obtained or isolated from the subject. In some embodiments, expression of a liver target gene, an amount or level of target gene mRNA, an amount or level of protein encoded by the target gene, an amount or level of target gene activity, or any combination thereof, is reduced in more than one type of cell (e.g., a liver macrophage), more than one groups of cells, more than one organ (e.g., liver and one or more other organ(s)), more than one fraction of blood (e.g., plasma and one or more other blood fraction(s)), more than one type of tissue (e.g., liver tissue and one or more other type(s) of tissue), more than one type of sample (e.g., a liver biopsy sample and one or more other type(s) of biopsy sample) obtained or isolated from the subject.

[0912] In some embodiments, the liver target gene may be a target gene from any mammal, such as a human. Any liver gene may be silenced according to the method described herein.

[0913] In some embodiments, an oligonucleotide herein, or a composition thereof, is administered via subcutaneous or intravenous administration.

### Treatment Methods in Adipose Tissue

[0914] The disclosure provides oligonucleotides for use as a medicament, in particular for use in a method for the treatment of diseases, disorders, and conditions associated with adipose tissue. The disclosure also provides oligonucleotides for use, or adaptable for use, to treat a subject (e.g., a human) having a disease, disorder or condition associated with expression of an adipose tissue target gene that would benefit from reducing expression of the adipose tissue target gene. In some embodiments, the disclosure provides oligonucleotides for use, or adapted for use, to treat a subject having a disease, disorder or condition associated with adipose tissue target gene expression. The disclosure also provides oligonucleotides for use, or adaptable for use, in the manufacture of a medicament or pharmaceutical composition for treating a disease, disorder or condition associated with expression of an adipose tissue target gene. In some embodiments, the oligonucleotides for use, or adaptable for use, target mRNA and reduce expression of an adipose tissue target gene (e.g., via the RNAi pathway). In some embodiments, the oligonucleotides for use, or adaptable for use, target mRNA and reduce the amount or level of adipose tissue target mRNA, protein and/or activity.

[0915] In addition, in some embodiments of the methods herein, a subject having a disease, disorder or condition associated with expression of an adipose tissue target gene or is predisposed to the same is selected for treatment with an oligonucleotide herein. In some embodiments, the method comprises selecting an individual having a marker (e.g., a biomarker) for a disease, disorder or condition associated with expression of an adipose tissue target gene, or predisposed to the same, such as, but not limited to, target mRNA, protein, or a combination thereof. Likewise, and as detailed below, some embodiments of the methods provided by the disclosure include steps such as measuring or obtaining a baseline value for a marker of expression of an adipose tissue target gene, and then comparing such obtained value to one or more other baseline values or values obtained after the subject is administered the oligonucleotide to assess the effectiveness of treatment.

[0916] The disclosure also provides methods of treating a subject having, suspected of having, or at risk of developing a disease, disorder or condition associated with expression of an adipose tissue target gene with an oligonucleotide provided herein. In some embodiments, the disclosure provides methods of treating or attenuating the onset or progression of a disease, disorder or condition associated with expression of an adipose tissue target gene using the oligonucleotides provided herein. In some embodiments, the disclosure provides methods to achieve one or more therapeutic benefits in a subject having a disease, disorder or condition associated with expression of an adipose tissue target gene using the oligonucleotides provided herein.

[0917] In some embodiments of the methods herein, the subject is treated by administering a therapeutically effective amount of any one or more of the oligonucleotides provided herein. In some embodiments, treatment comprises reducing expression of an adipose tissue target gene. In some embodiments, the subject is treated therapeutically. In some embodiments, the subject is treated prophylactically.

[0918] In some embodiments of the methods herein, an oligonucleotide provided herein, or a pharmaceutical composition comprising the oligonucleotide, is administered to a subject having a disease, disorder or condition associated with expression of an adipose tissue target gene such that target gene expression is reduced in the subject, thereby treating the subject. In some embodiments, an amount or level of target mRNA is reduced in the subject. In some embodiments, an amount or level of protein encoded by the target mRNA is reduced in the subject.

[0919] In some embodiments of the methods herein, an oligonucleotide provided herein, or a pharmaceutical composition comprising the oligonucleotide, is administered to a subject having a disease, disorder or condition associated with expression of an adipose tissue target gene such that target gene expression is reduced in the subject by at least about 30%, about 35%, about 40%, about 45%, about 50%, about 55%, about 60%, about 65%, about 70%, about 75%, about 80%, about 85%, about 90%, about 95%, about 99% or greater than 99% when compared to target gene expression prior to administration of the oligonucleotide or pharmaceutical composition. In some embodiments, expression of an adipose tissue target is reduced in the subject by at least about 30%, about 35%, about 40%, about 45%, about 50%, about 55%, about 60%, about 65%, about 70%, about 75%, about 80%, about 85%, about 90%, about 95%, about 99% or greater than 99% when compared to target gene expression in a subject (e.g., a reference or control subject) not receiving the oligonucleotide or pharmaceutical composition or receiving a control oligonucleotide, pharmaceutical composition or treatment.

[0920] In some embodiments of the methods herein, an oligonucleotide herein, or a pharmaceutical composition comprising the oligonucleotide, is administered to a subject having a disease, disorder or condition associated with expression of an adipose tissue target gene such that an amount or level of target mRNA is reduced in the subject by at least about 30%, about 35%, about 40%, about 45%, about 50%, about 55%, about 60%, about 65%, about 70%, about 75%, about 80%, about 85%, about 90%, about 95%, about 99% or greater than 99% when compared to the amount or level of target mRNA prior to administration of the oligonucleotide or pharmaceutical composition. In some embodiments, an amount or level of target mRNA is reduced in the subject by at least about 30%, about 35%, about 40%, about 45%, about 50%, about 55%, about 60%, about 65%, about 70%, about 75%, about 80%, about 85%, about 90%, about 95%, about 99% or greater than 99% when compared to an amount or level of target mRNA in a subject (e.g., a reference or control subject) not receiving the oligonucleotide or pharmaceutical composition or receiving a control oligonucleotide, pharmaceutical composition or treatment.

[0921] In some embodiments of the methods herein, an oligonucleotide herein, or a pharmaceutical composition comprising the oligonucleotide, is administered to a subject having a disease, disorder or condition associated with expression of an adipose tissue target gene such that an amount or level of protein encoded by the adipose target gene is reduced in the subject by at least about 30%, about 35%, about 40%, about 45%, about 50%, about 55%, about 60%, about 65%, about 70%, about 75%, about 80%, about 85%, about 90%, about 95%, about 99% or greater than 99% when compared to the amount or level of protein encoded by the target gene prior to administration of the oligonucleotide or pharmaceutical composition. In some embodiments, an amount or level of protein encoded by an adipose tissue target gene is reduced in the subject by at least about 30%, about 35%, about 40%, about 45%, about 50%, about 55%, about 60%, about 65%, about 70%, about 75%, about 80%, about 85%, about 90%, about 95%, about 99% or greater than 99% when compared to an amount or level of protein encoded by the target gene in a subject (e.g., a reference or control subject) not receiving the oligonucleotide or pharmaceutical composition or receiving a control oligonucleotide, pharmaceutical composition or treatment.

[0922] In some embodiments of the methods herein, an oligonucleotide herein, or a pharmaceutical composition comprising the oligonucleotide, is administered to a subject having a disease, disorder or condition associated with expression of an adipose tissue target gene such that an amount or level of target gene activity is reduced in the subject by at least about 30%, about 35%, about 40%, about 45%, about 50%, about 55%, about 60%, about 65%, about 70%, about 75%, about 80%, about 85%, about 90%, about 95%, about 99% or greater than 99% when compared to the amount or level of target gene activity prior to administration of the oligonucleotide or pharmaceutical composition. In some embodiments, an amount or level of target gene activity is reduced in the subject by at least about 30%, about 35%, about 40%, about 45%, about 50%, about 55%, about 60%, about 65%, about 70%, about 75%, about 80%, about 85%, about 90%, about 95%, about 99% or greater than 99% when compared to an amount or level of target gene activity in a subject (e.g., a reference or control subject) not receiving the oligonucleotide or pharmaceutical composition or receiving a control oligonucleotide, pharmaceutical composition or treatment.

[0923] Suitable methods for determining target gene expression, an amount or level of target mRNA, an amount or level of protein encoded by the target gene, and/or an amount or level of target gene activity, in the subject, or in a sample from the subject, are known in the art. Further, the Examples set forth herein illustrate exemplary methods for determining target gene expression.

[0924] In some embodiments, target gene expression, an amount or level of target gene mRNA, an amount or level of protein encoded by a target gene, an amount or level of target gene activity, or any combination thereof, is reduced in a cell, a population or a group of cells (e.g., an organoid), an organ, blood or a fraction thereof (e.g., plasma), a tissue (e.g., adipose tissue), a sample (e.g., adipose biopsy sample), or any other biological material obtained or isolated from the subject. In some embodiments, expression of an adipose tissue target gene, an amount or level of target gene mRNA, an amount or level of protein encoded by the target gene, an amount or level of target gene activity, or any combination thereof, is reduced in more than one type of cell, more than one groups of cells, more than one organ (e.g., adipose and one or more other organ(s)), more than one fraction of blood (e.g., plasma and one or more other blood fraction(s)), more than one type of tissue (e.g., adipose tissue and one or more other type(s) of tissue), more than one type of sample (e.g., a adipose biopsy sample and one or more other type(s) of biopsy sample) obtained or isolated from the subject.

[0925] In some embodiments, the adipose tissue target gene may be a target gene from any mammal, such as a human. Any adipose tissue gene may be silenced according to the method described herein.

[0926] In some embodiments, an oligonucleotide herein, or a composition thereof, is administered via subcutaneous or intravenous administration.

### Treatment Methods in Adrenal Tissue

[0927] The disclosure provides oligonucleotides for use as a medicament, in particular for use in a method for the treatment of diseases, disorders, and conditions associated with adrenal tissue. The disclosure also provides oligonucleotides for use, or adaptable for use, to treat a subject (e.g., a human) having a disease, disorder or condition associated with expression of an adrenal tissue target gene that would benefit from reducing expression of the adrenal tissue target gene. In some embodiments, the disclosure provides oligonucleotides for use, or adapted for use, to treat a subject having a disease, disorder or condition associated with adrenal tissue target gene expression. The disclosure also provides oligonucleotides for use, or adaptable for use, in the manufacture of a medicament or pharmaceutical composition for treating a disease, disorder or condition associated with expression of an adrenal tissue target gene. In some embodiments, the oligonucleotides for use, or adaptable for use, target mRNA and reduce expression of an adrenal tissue target gene (e.g., via the RNAi pathway). In some embodiments, the oligonucleotides for use, or adaptable for use, target mRNA and reduce the amount or level of adrenal tissue target mRNA, protein and/or activity.

[0928] In addition, in some embodiments of the methods herein, a subject having a disease, disorder or condition associated with expression of an adrenal tissue target gene or is predisposed to the same is selected for treatment with an oligonucleotide herein. In some embodiments, the method comprises selecting an individual having a marker (e.g., a biomarker) for a disease, disorder or condition associated with expression of an adrenal tissue target gene, or predisposed to the same, such as, but not limited to, target mRNA, protein, or a combination thereof. Likewise, and as detailed below, some embodiments of the methods provided by the disclosure include steps such as measuring or obtaining a baseline value for a marker of expression of an adrenal tissue target gene, and then comparing such obtained value to one or more other baseline values or values obtained after the subject is administered the oligonucleotide to assess the effectiveness of treatment.

[0929] The disclosure also provides methods of treating a subject having, suspected of having, or at risk of developing a disease, disorder or condition associated with expression of an adrenal tissue target gene with an oligonucleotide provided herein. In some embodiments, the disclosure provides methods of treating or attenuating the onset or progression of a disease, disorder or condition associated with expression of an adrenal tissue target gene using the oligonucleotides provided herein. In some embodiments, the disclosure provides methods to achieve one or more therapeutic benefits in a subject having a disease, disorder or condition associated with expression of an adrenal tissue target gene using the oligonucleotides provided herein.

[0930] In some embodiments of the methods herein, the subject is treated by administering a therapeutically effective amount of any one or more of the oligonucleotides provided herein. In some embodiments, treatment comprises reducing expression of an adrenal tissue target gene. In some embodiments, the subject is treated therapeutically. In some embodiments, the subject is treated prophylactically.

[0931] In some embodiments of the methods herein, an oligonucleotide provided herein, or a pharmaceutical composition comprising the oligonucleotide, is administered to a subject having a disease, disorder or condition associated with expression of an adrenal tissue target gene such that target gene expression is reduced in the subject, thereby treating the subject. In some embodiments, an amount or level of target mRNA is reduced in the subject. In some embodiments, an amount or level of protein encoded by the target mRNA is reduced in the subject.

[0932] In some embodiments of the methods herein, an oligonucleotide provided herein, or a pharmaceutical composition comprising the oligonucleotide, is administered to a subject having a disease, disorder or condition associated with expression of an adrenal tissue target gene such that target gene expression is reduced in the subject by at least about 30%, about 35%, about 40%, about 45%, about 50%, about 55%, about 60%, about 65%, about 70%, about 75%, about 80%, about 85%, about 90%, about 95%, about 99% or greater than 99% when compared to target gene expression prior to administration of the oligonucleotide or pharmaceutical composition. In some embodiments, expression of an adrenal tissue target is reduced in the subject by at least about 30%, about 35%, about 40%, about 45%, about 50%, about 55%, about 60%, about 65%, about 70%, about 75%, about 80%, about 85%, about 90%, about 95%, about 99% or greater than 99% when compared to target gene expression in a subject (e.g., a reference or control subject) not receiving the oligonucleotide or pharmaceutical composition or receiving a control oligonucleotide, pharmaceutical composition or treatment.

[0933] In some embodiments of the methods herein, an oligonucleotide herein, or a pharmaceutical composition comprising the oligonucleotide, is administered to a subject having a disease, disorder or condition associated with expression of an adrenal tissue target gene such that an amount or level of target mRNA is reduced in the subject by at least about 30%, about 35%, about 40%, about 45%, about 50%, about 55%, about 60%, about 65%, about 70%, about 75%, about 80%, about 85%, about 90%, about 95%, about 99% or greater than 99% when compared to the amount or level of target mRNA prior to administration of the oligonucleotide or pharmaceutical composition. In some embodiments, an amount or level of target mRNA is reduced in the subject by at least about 30%, about 35%, about 40%, about 45%, about 50%, about 55%, about 60%, about 65%, about 70%, about 75%, about 80%, about 85%, about 90%, about 95%, about 99% or greater than 99% when compared to an amount or level of target mRNA in a subject (e.g., a reference or control subject) not receiving the oligonucleotide or pharmaceutical composition or receiving a control oligonucleotide, pharmaceutical composition or treatment.

[0934] In some embodiments of the methods herein, an oligonucleotide herein, or a pharmaceutical composition comprising the oligonucleotide, is administered to a subject having a disease, disorder or condition associated with expression of an adrenal tissue target gene such that an amount or level of protein encoded by the adrenal target gene is reduced in the subject by at least about 30%, about 35%, about 40%, about 45%, about 50%, about 55%, about 60%, about 65%, about 70%, about 75%, about 80%, about 85%, about 90%, about 95%, about 99% or greater than 99% when compared to the amount or level of protein encoded by the target gene prior to administration of the oligonucleotide or pharmaceutical composition. In some embodiments, an amount or level of protein encoded by an adrenal tissue target gene is reduced in the subject by at least about 30%, about 35%, about 40%, about 45%, about 50%, about 55%, about 60%, about 65%, about 70%, about 75%, about 80%, about 85%, about 90%, about 95%, about 99% or greater than 99% when compared to an amount or level of protein encoded by the target gene in a subject (e.g., a reference or control subject) not receiving the oligonucleotide or pharmaceutical composition or receiving a control oligonucleotide, pharmaceutical composition or treatment.

[0935] In some embodiments of the methods herein, an oligonucleotide herein, or a pharmaceutical composition comprising the oligonucleotide, is administered to a subject having a disease, disorder or condition associated with expression of an adrenal tissue target gene such that an amount or level of target gene activity is reduced in the subject by at least about 30%, about 35%, about 40%, about 45%, about 50%, about 55%, about 60%, about 65%, about 70%, about 75%, about 80%, about 85%, about 90%, about 95%, about 99% or greater than 99% when compared to the amount or level of target gene activity prior to administration of the oligonucleotide or pharmaceutical composition. In some embodiments, an amount or level of target gene activity is reduced in the subject by at least about 30%, about 35%, about 40%, about 45%, about 50%, about 55%, about 60%, about 65%, about 70%, about 75%, about 80%, about 85%, about 90%, about 95%, about 99% or greater than 99% when compared to an amount or level of target gene activity in a subject (e.g., a reference or control subject) not receiving the oligonucleotide or pharmaceutical composition or receiving a control oligonucleotide, pharmaceutical composition or treatment.

[0936] Suitable methods for determining target gene expression, an amount or level of target mRNA, an amount or level of protein encoded by the target gene, and/or an amount or level of target gene activity, in the subject, or in a sample from the subject, are known in the art. Further, the Examples set forth herein illustrate exemplary methods for determining target gene expression.

[0937] In some embodiments, target gene expression, an amount or level of target gene mRNA, an amount or level of protein encoded by a target gene, an amount or level of target gene activity, or any combination thereof, is reduced in a cell, a population or a group of cells (e.g., an organoid), an organ, blood or a fraction thereof (e.g., plasma), a tissue (e.g., adrenal tissue), a sample (e.g., adrenal biopsy sample), or any other biological material obtained or isolated from the subject. In some embodiments, expression of an adrenal tissue target gene, an amount or level of target gene mRNA, an amount or level of protein encoded by the target gene, an amount or level of target gene activity, or any combination thereof, is reduced in more than one type of cell, more than one groups of cells, more than one organ (e.g., adrenal and one or more other organ(s)), more than one fraction of blood (e.g., plasma and one or more other blood fraction(s)), more than one type of tissue (e.g., adrenal tissue and one or more other type(s) of tissue), more than one type of sample (e.g., a adrenal biopsy sample and one or more other type(s) of biopsy sample) obtained or isolated from the subject.

[0938] In some embodiments, the adrenal tissue target gene may be a target gene from any mammal, such as a human. Any adrenal tissue gene may be silenced according to the method described herein.

[0939] In some embodiments, an oligonucleotide herein, or a composition thereof, is administered via subcutaneous or intravenous administration.

### Treatment Methods in Muscle Tissue

[0940] The disclosure provides oligonucleotides for use as a medicament, in particular for use in a method for the treatment of diseases, disorders, and conditions associated with muscle tissue. The disclosure also provides oligonucleotides for use, or adaptable for use, to treat a subject (e.g., a human) having a disease, disorder or condition associated with expression of a muscle target gene that would benefit from reducing expression of the muscle target gene. In some embodiments, the disclosure provides oligonucleotides for use, or adapted for use, to treat a subject having a disease, disorder or condition associated with muscle target gene expression. The disclosure also provides oligonucleotides for use, or adaptable for use, in the manufacture of a medicament or pharmaceutical composition for treating a disease, disorder or condition associated with expression of a muscle target gene. In some embodiments, the oligonucleotides for use, or adaptable for use, target mRNA and reduce expression of a muscle target gene (e.g., via the RNAi pathway). In some embodiments, the oligonucleotides for use, or adaptable for use, target mRNA and reduce the amount or level of muscle target mRNA, protein and/or activity.

[0941] In addition, in some embodiments of the methods herein, a subject having a disease, disorder or condition associated with expression of a muscle target gene or is predisposed to the same is selected for treatment with an oligonucleotide herein. In some embodiments, the method comprises selecting an individual having a marker (e.g., a biomarker) for a disease, disorder or condition associated with expression of a muscle target gene, or predisposed to the same, such as, but not limited to, target mRNA, protein, or a combination thereof. Likewise, and as detailed below, some embodiments of the methods provided by the disclosure include steps such as measuring or obtaining a baseline value for a marker of expression of a muscle target gene, and then comparing such obtained value to one or more other baseline values or values obtained after the subject is administered the oligonucleotide to assess the effectiveness of treatment.

[0942] The disclosure also provides methods of treating a subject having, suspected of having, or at risk of developing a disease, disorder or condition associated with expression of a muscle target gene with an oligonucleotide provided herein. In some embodiments, the disclosure provides methods of treating or attenuating the onset or progression of a disease, disorder or condition associated with expression of a muscle target gene using the oligonucleotides provided herein. In some embodiments, the disclosure provides methods to achieve one or more therapeutic benefits in a subject having a disease, disorder or condition associated with expression of a muscle target gene using the oligonucleotides provided herein.

[0943] In some embodiments of the methods herein, the subject is treated by administering a therapeutically effective amount of any one or more of the oligonucleotides provided herein. In some embodiments, treatment comprises reducing expression of a muscle target gene. In some embodiments, the subject is treated therapeutically. In some embodiments, the subject is treated prophylactically.

[0944] In some embodiments of the methods herein, an oligonucleotide provided herein, or a pharmaceutical composition comprising the oligonucleotide, is administered to a subject having a disease, disorder or condition associated with expression of a muscle target gene such that target gene expression is reduced in the subject, thereby treating the subject. In some embodiments, an amount or level of target mRNA is reduced in the subject. In some embodiments, an amount or level of protein encoded by the target mRNA is reduced in the subject.

[0945] In some embodiments of the methods herein, an oligonucleotide provided herein, or a pharmaceutical composition comprising the oligonucleotide, is administered to a subject having a disease, disorder or condition associated with expression of a muscle target gene such that target gene expression is reduced in the subject by at least about 30%, about 35%, about 40%, about 45%, about 50%, about 55%, about 60%, about 65%, about 70%, about 75%, about 80%, about 85%, about 90%, about 95%, about 99% or greater than 99% when compared to target gene expression prior to administration of the oligonucleotide or pharmaceutical composition. In some embodiments, expression of a muscle target is reduced in the subject by at least about 30%, about 35%, about 40%, about 45%, about 50%, about 55%, about 60%, about 65%, about 70%, about 75%, about 80%, about 85%, about 90%, about 95%, about 99% or greater than 99% when compared to target gene expression in a subject (e.g., a reference or control subject) not receiving the oligonucleotide or pharmaceutical composition or receiving a control oligonucleotide, pharmaceutical composition or treatment.

[0946] In some embodiments of the methods herein, an oligonucleotide herein, or a pharmaceutical composition comprising the oligonucleotide, is administered to a subject having a disease, disorder or condition associated with expression of a muscle target gene such that an amount or level of target mRNA is reduced in the subject by at least about 30%, about 35%, about 40%, about 45%, about 50%, about 55%, about 60%, about 65%, about 70%, about 75%, about 80%, about 85%, about 90%, about 95%, about 99% or greater than 99% when compared to the amount or level of target mRNA prior to administration of the oligonucleotide or pharmaceutical composition. In some embodiments, an amount or level of target mRNA is reduced in the subject by at least about 30%, about 35%, about 40%, about 45%, about 50%, about 55%, about 60%, about 65%, about 70%, about 75%, about 80%, about 85%, about 90%, about 95%, about 99% or greater than 99% when compared to an amount or level of target mRNA in a subject (e.g., a reference or control subject) not receiving the oligonucleotide or pharmaceutical composition or receiving a control oligonucleotide, pharmaceutical composition or treatment.

[0947] In some embodiments of the methods herein, an oligonucleotide herein, or a pharmaceutical composition comprising the oligonucleotide, is administered to a subject having a disease, disorder or condition associated with expression of a muscle target gene such that an amount or level of protein encoded by the muscle target gene is reduced in the subject by at least about 30%, about 35%, about 40%, about 45%, about 50%, about 55%, about 60%, about 65%, about 70%, about 75%, about 80%, about 85%, about 90%, about 95%, about 99% or greater than 99% when compared to the amount or level of protein encoded by the target gene prior to administration of the oligonucleotide or pharmaceutical composition. In some embodiments, an amount or level of protein encoded by a muscle target gene is reduced in the subject by at least about 30%, about 35%, about 40%, about 45%, about 50%, about 55%, about 60%, about 65%, about 70%, about 75%, about 80%, about 85%, about 90%, about 95%, about 99% or greater than 99% when compared to an amount or level of protein encoded by the target gene in a subject (e.g., a reference or control subject) not receiving the oligonucleotide or pharmaceutical composition or receiving a control oligonucleotide, pharmaceutical composition or treatment.

[0948] In some embodiments of the methods herein, an oligonucleotide herein, or a pharmaceutical composition comprising the oligonucleotide, is administered to a subject having a disease, disorder or condition associated with expression of a muscle target gene such that an amount or level of target gene activity is reduced in the subject by at least about 30%, about 35%, about 40%, about 45%, about 50%, about 55%, about 60%, about 65%, about 70%, about 75%, about 80%, about 85%, about 90%, about 95%, about 99% or greater than 99% when compared to the amount or level of target gene activity prior to administration of the oligonucleotide or pharmaceutical composition. In some embodiments, an amount or level of target gene activity is reduced in the subject by at least about 30%, about 35%, about 40%, about 45%, about 50%, about 55%, about 60%, about 65%, about 70%, about 75%, about 80%, about 85%, about 90%, about 95%, about 99% or greater than 99% when compared to an amount or level of target gene activity in a subject (e.g., a reference or control subject) not receiving the oligonucleotide or pharmaceutical composition or receiving a control oligonucleotide, pharmaceutical composition or treatment.

[0949] Suitable methods for determining target gene expression, an amount or level of target mRNA, an amount or level of protein encoded by the target gene, and/or an amount or level of target gene activity, in the subject, or in a sample from the subject, are known in the art. Further, the Examples set forth herein illustrate exemplary methods for determining target gene expression.

[0950] In some embodiments, target gene expression, an amount or level of target gene mRNA, an amount or level of protein encoded by a target gene, an amount or level of target gene activity, or any combination thereof, is reduced in a cell, a population or a group of cells (e.g., an organoid), an organ, blood or a fraction thereof (e.g., plasma), a tissue (e.g., muscle tissue), a sample (e.g., muscle biopsy sample), or any other biological material obtained or isolated from the subject. In some embodiments, expression of a muscle target gene, an amount or level of target gene mRNA, an amount or level of protein encoded by the target gene, an amount or level of target gene activity, or any combination thereof, is reduced in more than one type of cell, more than one groups of cells, more than one organ (e.g., muscle and one or more other organ(s)), more than one fraction of blood (e.g., plasma and one or more other blood fraction(s)), more than one type of tissue (e.g., muscle tissue and one or more other type(s) of tissue), more than one type of sample (e.g., muscle biopsy sample and one or more other type(s) of biopsy sample) obtained or isolated from the subject.

[0951] In some embodiments, the muscle target gene may be a target gene from any mammal, such as a human. Any muscle gene may be silenced according to the method described herein.

[0952] In some embodiments, an oligonucleotide herein, or a composition thereof, is administered via subcutaneous or intravenous administration.

### Treatment Methods in Heart Tissue

[0953] The disclosure provides oligonucleotides for use as a medicament, in particular for use in a method for the treatment of diseases, disorders, and conditions associated with heart tissue. The disclosure also provides oligonucleotides for use, or adaptable for use, to treat a subject (e.g., a human) having a disease, disorder or condition associated with expression of a heart target gene that would benefit from reducing expression of the heart target gene. In some embodiments, the disclosure provides oligonucleotides for use, or adapted for use, to treat a subject having a disease, disorder or condition associated with heart target gene expression. The disclosure also provides oligonucleotides for use, or adaptable for use, in the manufacture of a medicament or pharmaceutical composition for treating a disease, disorder or condition associated with expression of a heart target gene. In some embodiments, the oligonucleotides for use, or adaptable for use, target mRNA and reduce expression of a heart target gene (e.g., via the RNAi pathway). In some embodiments, the oligonucleotides for use, or adaptable for use, target mRNA and reduce the amount or level of heart target mRNA, protein and/or activity.

[0954] In addition, in some embodiments of the methods herein, a subject having a disease, disorder or condition associated with expression of a heart target gene or is predisposed to the same is selected for treatment with an oligonucleotide herein. In some embodiments, the method comprises selecting an individual having a marker (e.g., a biomarker) for a disease, disorder or condition associated with expression of a heart target gene, or predisposed to the same, such as, but not limited to, target mRNA, protein, or a combination thereof. Likewise, and as detailed below, some embodiments of the methods provided by the disclosure include steps such as measuring or obtaining a baseline value for a marker of expression of a heart target gene, and then comparing such obtained value to one or more other baseline values or values obtained after the subject is administered the oligonucleotide to assess the effectiveness of treatment.

[0955] The disclosure also provides methods of treating a subject having, suspected of having, or at risk of developing a disease, disorder or condition associated with expression of a heart target gene with an oligonucleotide provided herein. In some embodiments, the disclosure provides methods of treating or attenuating the onset or progression of a disease, disorder or condition associated with expression of a heart target gene using the oligonucleotides provided herein. In some embodiments, the disclosure provides methods to achieve one or more therapeutic benefits in a subject having a disease, disorder or condition associated with expression of a heart target gene using the oligonucleotides provided herein.

[0956] In some embodiments of the methods herein, the subject is treated by administering a therapeutically effective amount of any one or more of the oligonucleotides provided herein. In some embodiments, treatment comprises reducing expression of a heart target gene. In some embodiments, the subject is treated therapeutically. In some embodiments, the subject is treated prophylactically.

[0957] In some embodiments of the methods herein, an oligonucleotide provided herein, or a pharmaceutical composition comprising the oligonucleotide, is administered to a subject having a disease, disorder or condition associated with expression of a heart target gene such that target gene expression is reduced in the subject, thereby treating the subject. In some embodiments, an amount or level of target mRNA is reduced in the subject. In some embodiments, an amount or level of protein encoded by the target mRNA is reduced in the subject.

[0958] In some embodiments of the methods herein, an oligonucleotide provided herein, or a pharmaceutical composition comprising the oligonucleotide, is administered to a subject having a disease, disorder or condition associated with expression of a heart target gene such that target gene expression is reduced in the subject by at least about 30%, about 35%, about 40%, about 45%, about 50%, about 55%, about 60%, about 65%, about 70%, about 75%, about 80%, about 85%, about 90%, about 95%, about 99% or greater than 99% when compared to target gene expression prior to administration of the oligonucleotide or pharmaceutical composition. In some embodiments, expression of a heart target is reduced in the subject by at least about 30%, about 35%, about 40%, about 45%, about 50%, about 55%, about 60%, about 65%, about 70%, about 75%, about 80%, about 85%, about 90%, about 95%, about 99% or greater than 99% when compared to target gene expression in a subject (e.g., a reference or control subject) not receiving the oligonucleotide or pharmaceutical composition or receiving a control oligonucleotide, pharmaceutical composition or treatment.

[0959] In some embodiments of the methods herein, an oligonucleotide herein, or a pharmaceutical composition comprising the oligonucleotide, is administered to a subject having a disease, disorder or condition associated with expression of a heart target gene such that an amount or level of target mRNA is reduced in the subject by at least about 30%, about 35%, about 40%, about 45%, about 50%, about 55%, about 60%, about 65%, about 70%, about 75%, about 80%, about 85%, about 90%, about 95%, about 99% or greater than 99% when compared to the amount or level of target mRNA prior to administration of the oligonucleotide or pharmaceutical composition. In some embodiments, an amount or level of target mRNA is reduced in the subject by at least about 30%, about 35%, about 40%, about 45%, about 50%, about 55%, about 60%, about 65%, about 70%, about 75%, about 80%, about 85%, about 90%, about 95%, about 99% or greater than 99% when compared to an amount or level of target mRNA in a subject (e.g., a reference or control subject) not receiving the oligonucleotide or pharmaceutical composition or receiving a control oligonucleotide, pharmaceutical composition or treatment.

[0960] In some embodiments of the methods herein, an oligonucleotide herein, or a pharmaceutical composition comprising the oligonucleotide, is administered to a subject having a disease, disorder or condition associated with expression of a heart target gene such that an amount or level of protein encoded by the heart target gene is reduced in the subject by at least about 30%, about 35%, about 40%, about 45%, about 50%, about 55%, about 60%, about 65%, about 70%, about 75%, about 80%, about 85%, about 90%, about 95%, about 99% or greater than 99% when compared to the amount or level of protein encoded by the target gene prior to administration of the oligonucleotide or pharmaceutical composition. In some embodiments, an amount or level of protein encoded by a heart target gene is reduced in the subject by at least about 30%, about 35%, about 40%, about 45%, about 50%, about 55%, about 60%, about 65%, about 70%, about 75%, about 80%, about 85%, about 90%, about 95%, about 99% or greater than 99% when compared to an amount or level of protein encoded by the target gene in a subject (e.g., a reference or control subject) not receiving the oligonucleotide or pharmaceutical composition or receiving a control oligonucleotide, pharmaceutical composition or treatment.

[0961] In some embodiments of the methods herein, an oligonucleotide herein, or a pharmaceutical composition comprising the oligonucleotide, is administered to a subject having a disease, disorder or condition associated with expression of a heart target gene such that an amount or level of target gene activity is reduced in the subject by at least about 30%, about 35%, about 40%, about 45%, about 50%, about 55%, about 60%, about 65%, about 70%, about 75%, about 80%, about 85%, about 90%, about 95%, about 99% or greater than 99% when compared to the amount or level of target gene activity prior to administration of the oligonucleotide or pharmaceutical composition. In some embodiments, an amount or level of target gene activity is reduced in the subject by at least about 30%, about 35%, about 40%, about 45%, about 50%, about 55%, about 60%, about 65%, about 70%, about 75%, about 80%, about 85%, about 90%, about 95%, about 99% or greater than 99% when compared to an amount or level of target gene activity in a subject (e.g., a reference or control subject) not receiving the oligonucleotide or pharmaceutical composition or receiving a control oligonucleotide, pharmaceutical composition or treatment.

[0962] Suitable methods for determining target gene expression, an amount or level of target mRNA, an amount or level of protein encoded by the target gene, and/or an amount or level of target gene activity, in the subject, or in a sample from the subject, are known in the art. Further, the Examples set forth herein illustrate exemplary methods for determining target gene expression.

[0963] In some embodiments, target gene expression, an amount or level of target gene mRNA, an amount or level of protein encoded by a target gene, an amount or level of target gene activity, or any combination thereof, is reduced in a cell, a population or a group of cells (e.g., an organoid), an organ, blood or a fraction thereof (e.g., plasma), a tissue (e.g., heart tissue), a sample (e.g., heart biopsy sample), or any other biological material obtained or isolated from the subject. In some embodiments, expression of a heart target gene, an amount or level of target gene mRNA, an amount or level of protein encoded by the target gene, an amount or level of target gene activity, or any combination thereof, is reduced in more than one type of cell, more than one groups of cells, more than one organ (e.g., heart and one or more other organ(s)), more than one fraction of blood (e.g., plasma and one or more other blood fraction(s)), more than one type of tissue (e.g., heart tissue and one or more other type(s) of tissue), more than one type of sample (e.g., heart biopsy sample and one or more other type(s) of biopsy sample) obtained or isolated from the subject.

[0964] In some embodiments, the heart target gene may be a target gene from any mammal, such as a human. Any heart gene may be silenced according to the method described herein. In some embodiments, an oligonucleotide herein, or a composition thereof, is administered via subcutaneous or intravenous administration.

### Kits

[0965] In some embodiments, the disclosure provides a kit comprising a lipid-conjugated RNAi oligonucleotide herein, or a composition thereof, described herein, and instructions for use. In some embodiments, the kit comprises a lipid-conjugated RNAi oligonucleotide herein, or a composition thereof, described herein, and a package insert containing instructions for use of the kit and/or any component thereof. In some embodiments, the kit comprises, in a suitable container, a lipid-conjugated RNAi oligonucleotide herein, or a composition thereof, described herein, one or more controls, and various buffers, reagents, enzymes and other standard ingredients well known in the art. In some embodiments, the container comprises at least one vial, well, test tube, flask, bottle, syringe, or other container means, into which the lipid-conjugated RNAi oligonucleotide herein, or a composition thereof, is placed, and in some instances, suitably aliquoted. In some embodiments where an additional component is provided, the kit contains additional containers into which this component is placed. The kits can also include a means for containing a lipid-conjugated RNAi oligonucleotide herein, or a composition thereof, and any other reagent in close confinement for commercial sale. Such containers may include injection or blow-molded plastic containers into which the desired vials are retained. Containers and/or kits can include labeling with instructions for use and/or warnings.

[0966] In some embodiments, a kit comprises a lipid-conjugated RNAi oligonucleotide herein, or a composition thereof, described herein, and a pharmaceutically acceptable carrier, or a pharmaceutical composition comprising the lipid-conjugated RNAi oligonucleotide and instructions for treating or delaying progression of a disease, disorder or condition associated with expression of a target gene expressed in one or more tissues or cells in a subject in need thereof.

[0967] In some embodiments, a kit comprises a lipid-conjugated RNAi oligonucleotide herein, or a composition thereof, described herein, and a pharmaceutically acceptable carrier, or a pharmaceutical composition comprising the lipid-conjugated RNAi oligonucleotide and instructions for treating or delaying progression of a disease, disorder or condition associated with expression of a target gene expressed in the CNS (e.g., neuronal target gene) in a subject in need thereof.

[0968] In some embodiments, a kit comprises a lipid-conjugated RNAi oligonucleotide herein, or a composition thereof, described herein, and a pharmaceutically acceptable carrier, or a pharmaceutical composition comprising the lipid-conjugated RNAi oligonucleotide and instructions for treating or delaying progression of a disease, disorder or condition associated with expression of a target gene expressed in ocular tissue in a subject in need thereof.

[0969] In some embodiments, a kit comprises a lipid-conjugated RNAi oligonucleotide herein, or a composition thereof, described herein, and a pharmaceutically acceptable carrier, or a pharmaceutical composition comprising the lipid-conjugated RNAi oligonucleotide and instructions for treating or delaying progression of a disease, disorder or condition associated with expression of a target gene expressed in macrophages in a subject in need thereof.

[0970] In some embodiments, a kit comprises a lipid-conjugated RNAi oligonucleotide herein, or a composition thereof, described herein, and a pharmaceutically acceptable carrier, or a pharmaceutical composition comprising the lipid-conjugated RNAi oligonucleotide and instructions for treating or delaying progression of a disease, disorder or condition associated with expression of a target gene expressed in macrophages of the liver in a subject in need thereof.

[0971] In some embodiments, a kit comprises a lipid-conjugated RNAi oligonucleotide herein, or a composition thereof, described herein, and a pharmaceutically acceptable carrier, or a pharmaceutical composition comprising the lipid-conjugated RNAi oligonucleotide and instructions for treating or delaying progression of a disease, disorder or condition associated with expression of a target gene expressed in adipose tissue in a subject in need thereof.

[0972] In some embodiments, a kit comprises a lipid-conjugated RNAi oligonucleotide herein, or a composition thereof, described herein, and a pharmaceutically acceptable carrier, or a pharmaceutical composition comprising the lipid-conjugated RNAi oligonucleotide and instructions for treating or delaying progression of a disease, disorder or condition associated with expression of a target gene expressed in cardiac tissue in a subject in need thereof.

[0973] In some embodiments, a kit comprises a lipid-conjugated RNAi oligonucleotide herein, or a composition thereof, described herein, and a pharmaceutically acceptable carrier, or a pharmaceutical composition comprising the lipid-conjugated RNAi oligonucleotide and instructions for treating or delaying progression of a disease, disorder or condition associated with expression of a target gene expressed in muscle tissue (e.g., skeletal muscle) in a subject in need thereof.

[0974] In some embodiments, a kit comprises a lipid-conjugated RNAi oligonucleotide herein, or a composition thereof, described herein, and a pharmaceutically acceptable carrier, or a pharmaceutical composition comprising the lipid-conjugated RNAi oligonucleotide and instructions for treating or delaying progression of a disease, disorder or condition associated with expression of a target gene expressed in adrenal tissue in a subject in need thereof.

### Definitions

[0975] As used herein, the term “and/or” includes any and all combinations of one or more of the associated listed items. Further, the singular forms and the articles “a”, “an” and “the” are intended to include the plural forms as well, unless expressly stated otherwise. It will be further understood that the terms: includes, comprises, including and/or comprising, when used in this specification, specify the presence of stated features, integers, steps, operations, elements, and/or components, but do not preclude the presence or addition of one or more other features, integers, steps, operations, elements, components, and/or groups thereof. Further, it will be understood that when an element, including component or subsystem, is referred to and/or shown as being connected or coupled to another element, it can be directly connected or coupled to the other element or intervening elements may be present.

[0976] Unless defined otherwise, all technical and scientific terms used herein have the same meaning as commonly understood to one of ordinary skill in the art to which this disclosure belongs. Although methods and materials similar or equivalent to those described herein can be used in the practice of the disclosed methods and compositions, exemplary methods, and materials are described herein.

[0977] General texts which describe molecular biological techniques useful herein, including the use of vectors, promoters and many other relevant topics, include Berger and Kimmel, GUIDE TO MOLECULAR CLONING TECHNIQUES, METHODS IN ENZYMOLOGY, volume 152, (Academic Press, Inc., San Diego, Calif.) (“Berger”); Sambrook et al., MOLECULAR CLONING—A LABORATORY MANUAL, 2d ed., Vol. 1-3, Cold Spring Harbor Laboratory, Cold Spring Harbor, 1989 (“Sambrook”) and CURRENT PROTOCOLS IN MOLECULAR BIOLOGY, F. M. Ausubel et al., eds., CURRENT PROTOCOLS, A JOINT VENTURE BETWEEN GREENE PUBLISHING ASSOCIATES, INC. AND JOHN WILEY AND SONS, INC., (supplemented through 1999) (“Ausubel”). Examples of protocols sufficient to direct persons of skill through in vitro amplification methods, including the polymerase chain reaction (PCR), the ligase chain reaction (LCR), Q.beta.-replicase amplification and other RNA polymerase mediated techniques (e.g., NASBA), e.g., for the production of the homologous nucleic acids of the disclosure are found in Berger, Sambrook, and Ausubel, as well as in Mullis et al., (1987) U.S. Pat. No. 4,683,202; Innis et al., eds. (1990); PCR PROTOCOLS: A GUIDE TO METHODS AND APPLICATIONS (Academic Press Inc. San Diego, Calif.) (“Innis”); Arnheim and Levinson (Oct. 1, 1990) CandEN 36-47; J. NIH RES. (1991) 3:81-94; Kwoh et al., (1989) PROC. NATL. ACAD. SCI. USA 86:1173; Guatelli et al (1990) PROC. NAT'L. ACAD. SCI. USA 87:1874; Lomell et al., (1989) J. CLIN. CHEM 35:1826; Landegren et al., (1988) SCIENCE 241:1077-80; Van Brunt (1990) BIOTECHNOLOGY 8:291-94; Wu and Wallace (1989) GENE 4:560; Barringer et al., (1990) GENE 89:117; and, Sooknanan and Malek (1995) BIOTECHNOLOGY 13:563-564. Improved methods for cloning in vitro amplified nucleic acids are described in Wallace et al., U.S. Pat. No. 5,426,039. Improved methods for amplifying large nucleic acids by PCR are summarized in Cheng et al., (1994) NATURE 369:684-85 and the references cited therein, in which PCR amplicons of up to 40 kb are generated.

[0978] As used in the specification and the appended claims, the singular forms “a,” “an” and “the” include plural referents unless the context clearly dictates otherwise. Thus, for example, reference to “a pharmaceutical carrier” includes mixtures of two or more such carriers, and the like.

[0979] Ranges can be expressed herein as from “about” one value, and/or to “about” another value. When such a range is expressed, another embodiment includes from the one value and/or to the other value. Similarly, when values are expressed as approximations, by use of the antecedent “about,” it will be understood that the value forms another embodiment. It will be further understood that the endpoints of each of the ranges are significant both in relation to the other endpoint, and independently of the other endpoint. It is also understood that there are several values disclosed herein, and that each value is also herein disclosed as “about” that value in addition to the value itself. For example, if the value “10” is disclosed, then “about 10” is also disclosed. It is also understood that when a value is disclosed that “less than or equal to” the value, “greater than or equal to the value” and possible ranges between values are also disclosed, as appropriately understood by the skilled artisan. For example, if the value “10” is disclosed the “less than or equal to 10” as well as “greater than or equal to 10” is also disclosed. It is also understood that the throughout the application, data is provided in several different formats, and that this data, represents endpoints and starting points, and ranges for any combination of the data points. For example, if a particular datapoint “10” and a particular data point 15 are disclosed, it is understood that greater than, greater than or equal to, less than, less than or equal to, and equal to 10 and 15 are considered disclosed as well as between 10 and 15. It is also understood that each unit between two particular units are also disclosed. For example, if 10 and 15 are disclosed, then 11, 12, 13, and 14 are also disclosed.

[0980] As used here, the term “amount” refers to an absolute amount (e.g., an absolute amount of mRNA or protein), a relative amount (e.g., a relative amount of target mRNA as measured by PCR assay or protein), or a concentration (e.g. a concentration of lipid-conjugated RNA in a composition), whether the amount referred to in a given instance refers to an absolute amount, concentration, or both, will be clear to the skilled artisan based on the context provided herein.

[0981] As used herein, “bicyclic nucleotide” refers to a nucleotide comprising a bicyclic sugar moiety.

[0982] As used herein “bicyclic sugar moiety” refers to a modified sugar moiety comprising a 4 to 7 membered ring (including but not limited to a furanosyl) comprising a bridge connecting two atoms of the 4 to 7 membered ring to form a second ring, resulting in a bicyclic structure. Typically, the 4 to 7 membered ring is a sugar. In some embodiments, the 4-to-7-member ring is a furanosyl. In certain embodiments, the bridge connects the 2′-carbon and the 4′-carbon of the furanosyl.

[0983] As used herein, “complementary” refers to a structural relationship between two nucleotides (e.g., on two opposing nucleic acids or on opposing regions of a single nucleic acid strand) that permits the two nucleotides to form base pairs with one another. For example, a purine nucleotide of one nucleic acid that is complementary to a pyrimidine nucleotide of an opposing nucleic acid may base pair together by forming hydrogen bonds with one another. In some embodiments, complementary nucleotides can base pair in the Watson-Crick manner or in any other manner that allows for the formation of stable duplexes. In some embodiments, two nucleic acids may have regions of multiple nucleotides that are complementary with each other to form regions of complementarity, as described herein.

[0984] As used herein, “deoxyribonucleotide” refers to a nucleotide having a hydrogen in place of a hydroxyl at the 2′ position of its pentose sugar when compared with a ribonucleotide. A modified deoxyribonucleotide is a deoxyribonucleotide having one or more modifications or substitutions of atoms other than at the 2′ position, including modifications or substitutions in or of the sugar, phosphate group or base.

[0985] As used herein, “double-stranded RNA” or “dsRNA” refers to an RNA oligonucleotide that is substantially in a duplex form. In some embodiments, the complementary base-pairing of duplex region(s) of a dsRNA oligonucleotide is formed between antiparallel sequences of nucleotides of covalently separate nucleic acid strands. In some embodiments, complementary base-pairing of duplex region(s) of a dsRNA formed between antiparallel sequences of nucleotides of nucleic acid strands that are covalently linked. In some embodiments, complementary base-pairing of duplex region(s) of a dsRNA is formed from single nucleic acid strand that is folded (e.g., via a hairpin) to provide complementary antiparallel sequences of nucleotides that base pair together. In some embodiments, a dsRNA comprises two covalently separate nucleic acid strands that are fully duplexed with one another. However, in some embodiments, a dsRNA comprises two covalently separate nucleic acid strands that are partially duplexed (e.g., having overhangs at one or both ends). In some embodiments, a dsRNA comprises antiparallel sequence of nucleotides that are partially complementary, and thus, may have one or more mismatches, which may include internal mismatches or end mismatches.

[0986] As used herein, “duplex,” in reference to nucleic acids (e.g., oligonucleotides), refers to a structure formed through complementary base pairing of two antiparallel sequences of nucleotides.

[0987] As used herein, “excipient” refers to a non-therapeutic agent that may be included in a composition, for example, to provide or contribute to a desired consistency or stabilizing effect. As used herein, “loop” refers to an unpaired region of a nucleic acid (e.g., oligonucleotide) that is flanked by two antiparallel regions of the nucleic acid that are sufficiently complementary to one another, such that under appropriate hybridization conditions (e.g., in a phosphate buffer, in a cells), the two antiparallel regions, which flank the unpaired region, hybridize to form a duplex (referred to as a “stem”).

[0988] As used herein, “melting temperature” or “Tm” means the temperature at which the two strands of a duplex nucleic acid separate. Tₘ is often used as a measure of duplex stability or the binding affinity of two strands of complementary nucleic acids or portions thereof. Tₘ can be measured by using the UV spectrum to determine the formation and breakdown (melting) of hybridization. Base stacking, which occurs during hybridization, is accompanied by a reduction in UV absorption (hypochromicity). Consequently, a reduction in UV absorption indicates a higher Tₘ.

[0989] As used herein, “modified internucleotide linkage” refers to an internucleotide linkage having one or more chemical modifications when compared with a reference internucleotide linkage comprising a phosphodiester bond. In some embodiments, a modified nucleotide is a non-naturally occurring linkage. Typically, a modified internucleotide linkage confers one or more desirable properties to a nucleic acid in which the modified internucleotide linkage is present. For example, a modified nucleotide may improve thermal stability, resistance to degradation, nuclease resistance, solubility, bioactivity, reduced immunogenicity, etc.

[0990] As used herein, “modified nucleotide” refers to a nucleotide having one or more chemical modifications when compared with a corresponding reference nucleotide selected from: adenine ribonucleotide, guanine ribonucleotide, cytosine ribonucleotide, uracil ribonucleotide, adenine deoxyribonucleotide, guanine deoxyribonucleotide, cytosine deoxyribonucleotide and thymidine deoxyribonucleotide. In some embodiments, a modified nucleotide is a non-naturally occurring nucleotide. In some embodiments, a modified nucleotide has one or more chemical modification in its sugar, nucleobase and/or phosphate group. In some embodiments, a modified nucleotide has one or more chemical moieties conjugated to a corresponding reference nucleotide. Typically, a modified nucleotide confers one or more desirable properties to a nucleic acid in which the modified nucleotide is present. For example, a modified nucleotide may improve thermal stability, resistance to degradation, nuclease resistance, solubility, bioavailability, bioactivity, reduced immunogenicity, etc.

[0991] As used herein “neuronal mRNA” and “neuronal gene” refers to any gene, mRNA, and/or protein encoded/expressed by a gene in neurons of the central nervous system. In some embodiments, the neuronal mRNA or neuronal gene is predominantly expressed in neurons relative to other cell types, e.g., other cell types of the CNS.

[0992] As used herein “ocular mRNA” and “ocular gene” refers to any gene, mRNA, and/or protein encoded/expressed by a gene in a cell in ocular tissue. In some embodiments, the ocular mRNA or ocular gene is predominantly expressed in cells of ocular tissue relative to other cell types, e.g., cell types of other organs.

[0993] As used herein “macrophage mRNA” and “macrophage gene” refers to any gene, mRNA, and/or protein encoded/expressed by a gene in a macrophage in a tissue, e.g., liver. In some embodiments, the macrophage mRNA or macrophage gene is predominantly expressed in macrophages relative to other cell types, e.g., non-macrophage immune cells.

[0994] As used herein, “nicked tetraloop structure” refers to a structure of a RNAi oligonucleotide that is characterized by separate sense (passenger) and antisense (guide) strands, in which the sense strand has a region of complementarity with the antisense strand, and in which at least one of the strands, generally the sense strand, has a tetraloop configured to stabilize an adjacent stem region formed within the at least one strand.

[0995] As used herein, “oligonucleotide” refers to a short nucleic acid (e.g., less than about 100 nucleotides in length). An oligonucleotide may be single stranded (ss) or ds. An oligonucleotide may or may not have duplex regions. As a set of non-limiting examples, an oligonucleotide may be, but is not limited to, a small interfering RNA (siRNA), microRNA (miRNA), short hairpin RNA (shRNA), dicer substrate interfering RNA (dsiRNA), antisense oligonucleotide, short siRNA or ss siRNA. In some embodiments, a double-stranded (dsRNA) is an RNAi oligonucleotide.

[0996] The terms “lipid-conjugated RNAi oligonucleotide” and “oligonucleotide-ligand conjugate” are used interchangeably and refer to an oligonucleotide comprising one or more nucleotides conjugated with one or more targeting ligands (e.g., lipid).

[0997] As used herein, “overhang” refers to terminal non-base pairing nucleotide(s) resulting from one strand or region extending beyond the terminus of a complementary strand with which the one strand or region forms a duplex. In some embodiments, an overhang comprises one or more unpaired nucleotides extending from a duplex region at the 5′ terminus or 3′ terminus of a dsRNA. In some embodiments, the overhang is a 3′ or 5′ overhang on the antisense strand or sense strand of a dsRNA.

[0998] As used herein, “phosphate analog” refers to a chemical moiety that mimics the electrostatic and/or steric properties of a phosphate group. In some embodiments, a phosphate analog is positioned at the 5′ terminal nucleotide of an oligonucleotide in place of a 5′-phosphate, which is often susceptible to enzymatic removal. In some embodiments, a 5′ phosphate analog contains a phosphatase-resistant linkage. Examples of phosphate analogs include, but are not limited to, 5′ phosphonates, such as 5′ methylene phosphonate (5′-MP) and 5′-(E)-vinylphosphonate (5′-VP). In some embodiments, an oligonucleotide has a phosphate analog at a 4′-carbon position of the sugar (referred to as a “4′-phosphate analog”) at a 5′-terminal nucleotide. An example of a 4′-phosphate analog is oxymethyl phosphonate, in which the oxygen atom of the oxymethyl group is bound to the sugar moiety (e.g., at its 4′-carbon) or analog thereof. See, e.g., U.S. Provisional Patent Application Nos. 62/383,207 (filed on 2 Sep. 2016) and 62/393,401 (filed on 12 Sep. 2016). Other modifications have been developed for the 5′ end of oligonucleotides (see, e.g., Intl. Patent Application No. WO 2011/133871; U.S. Pat. No. 8,927,513; and Prakash et al., (2015) NUCLEIC ACIDS RES. 43:2993-3011).

[0999] As used herein, “reduced expression” of a target gene refers to a decrease in the amount or level of RNA transcript (e.g., target mRNA) or protein encoded by the target gene and/or a decrease in the amount or level of activity of the gene in a cell, a population of cells, a sample, or a subject, when compared to an appropriate reference (e.g., a reference cell, population of cells, sample, or subject). For example, the act of contacting a cell with an oligonucleotide or conjugate herein (e.g., an lipid-conjugated RNAi oligonucleotide comprising an antisense strand having a nucleotide sequence that is complementary to a nucleotide sequence comprising a target mRNA) may result in a decrease in the amount or level of target mRNA, protein encoded by a target gene, and/or target gene activity (e.g., via inactivation and/or degradation of target mRNA by the RNAi pathway) when compared to a cell that is not treated with the double-stranded oligonucleotide. Similarly, and as used herein, “reducing expression” refers to an act that results in reduced expression of a target gene.

[1000] As used herein, “region of complementarity” refers to a sequence of nucleotides of a nucleic acid (e.g., a dsRNA) that is sufficiently complementary to an antiparallel sequence of nucleotides to permit hybridization between the two sequences of nucleotides under appropriate hybridization conditions (e.g., in a phosphate buffer, in a cell, etc.). In some embodiments, an oligonucleotide herein comprises a targeting sequence having a region of complementary to a mRNA target sequence.

[1001] As used herein, “ribonucleotide” refers to a nucleotide having a ribose as its pentose sugar, which contains a hydroxyl group at its 2′ position. A modified ribonucleotide is a ribonucleotide having one or more modifications or substitutions of atoms other than at the 2′ position, including modifications or substitutions in or of the ribose, phosphate group or base. As used herein, “RNAi oligonucleotide” refers to either (a) a dsRNA having a sense strand (passenger) and antisense strand (guide), in which the antisense strand or part of the antisense strand is used by the Argonaute 2 (Ago2) endonuclease in the cleavage of a target mRNA or (b) a ss oligonucleotide having a single antisense strand, where that antisense strand (or part of that antisense strand) is used by the Ago2 endonuclease in the cleavage of a target mRNA. As used herein, “strand” refers to a single, contiguous sequence of nucleotides linked together through internucleotide linkages (e.g., phosphodiester linkages or phosphorothioate linkages). In some embodiments, a strand has two free ends (e.g., a 5′ end and a 3′ end).

[1002] As used herein, “subject” means any mammal, including mice, rabbits, and humans. In one embodiment, the subject is a human or NHP. Moreover, “individual” or “patient” may be used interchangeably with “subject.”

[1003] As used herein, “synthetic” refers to a nucleic acid or other molecule that is artificially synthesized (e.g., using a machine (e.g., a solid-state nucleic acid synthesizer)) or that is otherwise not derived from a natural source (e.g., a cell or organism) that normally produces the molecule.

[1004] As used herein, “targeting ligand” refers to a molecule or “moiety” (e.g., a carbohydrate, amino sugar, cholesterol, polypeptide, or lipid) that selectively binds to a cognate molecule (e.g., a receptor) of a tissue or cell of interest and/or that is conjugatable to another substance for purposes of targeting the other substance to the tissue or cell of interest. For example, in some embodiments, a targeting ligand may be conjugated to an oligonucleotide for purposes of targeting the oligonucleotide to a specific tissue or cell of interest. In some embodiments, a targeting ligand selectively binds to a cell surface receptor. Accordingly, in some embodiments, a targeting ligand when conjugated to an oligonucleotide facilitates delivery of the oligonucleotide into a particular cell through selective binding to a receptor expressed on the surface of the cell and endosomal internalization by the cell of the complex comprising the oligonucleotide, targeting ligand and receptor. In some embodiments, a targeting ligand is conjugated to an oligonucleotide via a linker that is cleaved following or during cellular internalization such that the oligonucleotide is released from the targeting ligand in the cell.

[1005] As used herein, “tetraloop” refers to a loop that increases stability of an adjacent duplex formed by hybridization of flanking sequences of nucleotides. The increase in stability is detectable as an increase in melting temperature (Tₘ) of an adjacent stem duplex that is higher than the Tn of the adjacent stem duplex expected, on average, from a set of loops of comparable length consisting of randomly selected sequences of nucleotides. For example, a tetraloop can confer a Tₘ of at least about 50° C., at least about 55° C., at least about 56° C., at least about 58° C., at least about 60° C., at least about 65° C. or at least about 75° C. in 10 mM NaHPO₄ to a hairpin comprising a duplex of at least 2 base pairs (bp) in length. In some embodiments, a tetraloop may stabilize a bp in an adjacent stem duplex by stacking interactions. In addition, interactions among the nucleotides in a tetraloop include, but are not limited to, non-Watson-Crick base pairing, stacking interactions, hydrogen bonding and contact interactions (Cheong et al., (1990) NATURE 346:680-82; Heus and Pardi (1991) SCIENCE 253:191-94). In some embodiments, a tetraloop comprises or consists of 3 to 6 nucleotides and is typically 4 to 5 nucleotides. In some embodiments, a tetraloop comprises or consists of 3, 4, 5 or 6 nucleotides, which may or may not be modified (e.g., which may or may not be conjugated to a targeting moiety). In one embodiment, a tetraloop consists of 4 nucleotides. Any nucleotide may be used in the tetraloop and standard IUPAC-IUB symbols for such nucleotides may be used as described in Cornish-Bowden ((1985) NUCLEIC ACIDS RES. 13:3021-3030). For example, the letter “N” may be used to mean that any base may be in that position, the letter “R” may be used to show that A (adenine) or G (guanine) may be in that position, and “B” may be used to show that C (cytosine), G (guanine), or T (thyminc) may be in that position. Examples of tetraloops include the UNCG family of tetraloops (e.g., UUCG), the GNRA family of tetraloops (e.g., GAAA), and the CUUG tetraloop (Woese et al., (1990) PROC. NATL. ACAD. SCI. USA 87:8467-71; Antao et al., (1991) NUCLEIC ACIDS RES. 19:5901-05). Examples of DNA tetraloops include the d (GNNA) family of tetraloops (e.g., d (GTTA), the d (GNRA)) family of tetraloops, the d (GNAB) family of tetraloops, the d (CNNG) family of tetraloops, and the d (TNCG) family of tetraloops (e.g., d (TTCG)). (See, e.g., Nakano et al., (2002) BIOCHEM. 41:4281-92; Shinji et al., (2000) NIPPON KAGAKKAI KOEN YOKOSHU 78:731). In some embodiments, the tetraloop is contained within a nicked tetraloop structure.

[1006] As used herein, “Tm-increasing nucleotide” refers to a nucleotide that increases the melting temperature (Tₘ) of an oligonucleotide duplex as compared to the oligonucleotide duplex without the Tₘ-increasing nucleotide. Tₘ-increasing nucleotides include, but are not limited to, bicyclic nucleotides, tricyclic nucleotides, a G-clamp, and analogues thereof, and hexitol nucleotides. Certain modified nucleotides having a modified sugar moiety, or a modified nucleobase can also be used to increase the Tₘ of an oligonucleotide duplex. As used herein, the term “Tₘ-increasing nucleotide” specifically excludes nucleotides modified at the 2′-position of the sugar moiety with 2′-OMe or 2′-F.

[1007] As used herein, “treat” or “treating” refers to the act of providing care to a subject in need thereof, for example, by administering a therapeutic agent (e.g., an oligonucleotide herein) to the subject, for purposes of improving the health and/or well-being of the subject with respect to an existing condition (e.g., a disease, disorder) or to prevent or decrease the likelihood of the occurrence of a condition. In some embodiments, treatment involves reducing the frequency or severity of at least one sign, symptom or contributing factor of a condition (e.g., disease, disorder) experienced by a subject.

### Embodiments

[1008] Embodiment I-1. A double-stranded oligonucleotide comprising an antisense strand of 15-30 nucleotides in length and a sense strand of 15-50 nucleotides in length, wherein the antisense and sense strands form a duplex region of 15-30 base pairs, wherein the antisense strand comprises a region of complementarity to an astrocyte mRNA target sequence, and wherein the sense strand comprises at least one lipid moiety conjugated to a nucleotide of the sense strand.
[1009] Embodiment I-2. The oligonucleotide of Embodiment I-1, wherein the lipid moiety is selected from

[chemical structure]

[1010] Embodiment I-3. The oligonucleotide of Embodiment I-1, wherein the lipid moiety is a hydrocarbon chain.
[1011] Embodiment I-4. The oligonucleotide of Embodiment I-3, wherein the hydrocarbon chain is a C8-C30 hydrocarbon chain.
[1012] Embodiment I-5. The oligonucleotide of Embodiment I-3 or 4, wherein the hydrocarbon chain is a C16 hydrocarbon chain.
[1013] Embodiment I-6. The oligonucleotide of Embodiment I-5 wherein the C16 hydrocarbon chain is represented by

[chemical structure]

[1014] Embodiment I-7. The oligonucleotide of any one of Embodiments I-1-6, wherein the lipid moiety is conjugated to the 2′ carbon of the ribose ring of the nucleotide.
[1015] Embodiment I-8. The oligonucleotide of any one of Embodiments I-1-7, wherein the oligonucleotide is blunt ended.
[1016] Embodiment I-9. The oligonucleotide of Embodiment I-8, wherein the oligonucleotide is blunt ended at the 3′ terminus of the oligonucleotide.
[1017] Embodiment I-10. The oligonucleotide of any one of Embodiments I-1-7, wherein the oligonucleotide comprises a blunt end.
[1018] Embodiment I-11. The oligonucleotide of Embodiment I-10, wherein the blunt end comprises the 3′ end of the sense strand.
[1019] Embodiment I-12. The oligonucleotide of any one of Embodiments I-8-11, wherein the sense strand is 20-22 nucleotides.
[1020] Embodiment I-13. The oligonucleotide of Embodiment I-12, wherein the at least one lipid moiety is conjugated to a nucleotide at position 1, position 4, position 8, position 12, position 13, position 18, or position 20 of the sense strand, wherein positions are numbered 5′ to 3′.
[1021] Embodiment I-14. The oligonucleotide of Embodiment I-12, wherein the astrocyte mRNA target is expressed in the spinal cord, wherein the at least one lipid moiety is conjugated to a nucleotide at position 1, position 4, position 8, position 12, position 13, position 18 or position 20 of the sense strand, and wherein positions are numbered 5′ to 3′.
[1022] Embodiment I-15. The oligonucleotide of Embodiment I-12, wherein the astrocyte mRNA target is expressed in the medulla, wherein the at least one lipid moiety is conjugated to a nucleotide at position 1, position 4, position 8, position 12, position 13, position 18 or position 20 of the sense strand, and wherein positions are numbered 5′ to 3′.
[1023] Embodiment I-16. The oligonucleotide of Embodiment I-12, wherein the astrocyte mRNA target is expressed in the cerebellum, wherein the at least one lipid moiety is conjugated to a nucleotide at position 4, position 12, position 13, position 18 or position 20 of the sense strand, and wherein positions are numbered 5′ to 3′.
[1024] Embodiment I-17. The oligonucleotide of Embodiment I-12, wherein the astrocyte mRNA target is expressed in the hypothalamus, wherein the at least one lipid moiety is conjugated to a nucleotide at position 1, position 4, position 12, position 13, position 18 or position 20 of the sense strand, and wherein positions are numbered 5′ to 3′.
[1025] Embodiment I-18. The oligonucleotide of Embodiment I-12, wherein the astrocyte mRNA target is expressed in the frontal cortex, wherein the at least one lipid moiety is conjugated to a nucleotide at position 4 of the sense strand, and wherein positions are numbered 5′ to 3′.
[1026] Embodiment I-19. The oligonucleotide of any one of Embodiments I-1-7, wherein the sense strand comprises a stem-loop at the 3′ end, wherein the stem-loop comprises a nucleotide sequence represented by the formula: 5′-S1-L-S2-3′, wherein S1 is complementary to S2, and wherein L forms a loop between S1 and S2.
[1027] Embodiment I-20. The oligonucleotide of any one of Embodiments I-1-7 and 19, wherein the sense strand is 36-38 nucleotides.
[1028] Embodiment I-21. The oligonucleotide of Embodiment I-20, wherein the astrocyte mRNA target is expressed in the spinal cord, wherein the at least one lipid moiety is conjugated to a nucleotide at position 1, position 4, position 8, position 12, position 13, position 18, position 20, position 23, position 28, position 29 or position 30 of the sense strand, and wherein positions are numbered 5′ to 3′.
[1029] Embodiment I-22. The oligonucleotide of Embodiment I-20, wherein the astrocyte mRNA target is expressed in the medulla, wherein the at least one lipid moiety is conjugated to a nucleotide at position 1, position 4, position 18, position 20, position 23, position 28, position 29 or position 30 of the sense strand, and wherein positions are numbered 5′ to 3′.
[1030] Embodiment I-23. The oligonucleotide of Embodiment I-20, wherein the astrocyte mRNA target is expressed in the cerebellum, wherein the at least one lipid moiety is conjugated to a nucleotide at position 1, position 4, position 23, position 28, or position 29 of the sense strand, and wherein positions are numbered 5′ to 3′.
[1031] Embodiment I-24. The oligonucleotide of Embodiment I-20, wherein the astrocyte mRNA target is expressed in the hypothalamus, wherein the at least one lipid moiety is conjugated to a nucleotide at position 1, position 4, position 12, position 13, position 18, position 20, position 23, position 28, position 29 or position 30 of the sense strand, and wherein positions are numbered 5′ to 3′.
[1032] Embodiment I-25. The oligonucleotide of Embodiment I-20, wherein the astrocyte mRNA target is expressed in the frontal cortex, wherein the at least one lipid moiety is conjugated to a nucleotide at position 23 of the sense strand, and wherein positions are numbered 5′ to 3′.
[1033] Embodiment I-26. The oligonucleotide of any one of Embodiments I-1-25, wherein the antisense strand is 22-24 nucleotides.
[1034] Embodiment I-27. The oligonucleotide of any one of Embodiments I-1-26, wherein the duplex region is 20-22 base pairs.
[1035] Embodiment I-28. The oligonucleotide of any one of Embodiments I-1-27, wherein the antisense strand comprises a 1-4 nucleotide overhang at the 3′ terminus.
[1036] Embodiment I-29. The oligonucleotide of Embodiment I-28, wherein the overhang comprises purine nucleotides.
[1037] Embodiment I-30. The oligonucleotide of Embodiment I-28 or 29, wherein the overhang sequence is 2 nucleotides in length.
[1038] Embodiment I-31. The oligonucleotide of Embodiment I-30, wherein the overhang is selected from AA, GG, AG, and GA.
[1039] Embodiment I-32. The oligonucleotide of Embodiment I-31, wherein the overhang is GG or AA.
[1040] Embodiment I-33. The oligonucleotide of Embodiment I-31, wherein the overhang is GG.
[1041] Embodiment I-34. The oligonucleotide of any one of Embodiments I-1-33, wherein the region of complementarity is complementary to at least 15 consecutive nucleotides of the astrocyte mRNA target sequence.
[1042] Embodiment I-35. The oligonucleotide of any one of Embodiments I-1-34, wherein the region of complementarity is complementary to 19 consecutive nucleotides of the astrocyte mRNA target sequence.
[1043] Embodiment I-36. The oligonucleotide of any one of Embodiments I-1-35, wherein the region of complementarity is fully complementary to the astrocyte mRNA target sequence.
[1044] Embodiment I-37. The oligonucleotide of any one of Embodiments I-1-35, wherein the region of complementarity is partially complementary to the astrocyte mRNA target sequence.
[1045] Embodiment I-38. The oligonucleotide of Embodiment I-37, wherein the region of complementarity comprises no more than four mismatches to the astrocyte mRNA target sequence.
[1046] Embodiment I-39. The oligonucleotide of any one of Embodiments I-1-38, wherein the oligonucleotide comprises at least one modified nucleotide.
[1047] Embodiment I-40. The oligonucleotide of Embodiment I-39, wherein the modified nucleotide comprises a 2′-modification.
[1048] Embodiment I-41. The oligonucleotide of Embodiment I-40, wherein each of the nucleotides of the sense strand and the antisense strand comprise a 2′-modification except the nucleotide of the sense strand conjugated to the at least one lipid moiety.
[1049] Embodiment I-42. The oligonucleotide of Embodiment I-40 or 41, wherein the 2′-modification is a modification selected from 2′-aminoethyl, 2′-fluoro, 2′-O-methyl, 2′-O-methoxyethyl, and 2′-deoxy-2′-fluoro-β-d-arabinonucleic acid.
[1050] Embodiment I-43. The oligonucleotide of any one of Embodiments I-40-42, wherein about 10-20%, 10%, 11%, 12%, 13%, 14% 15%, 16%, 17%, 18%, 19% or 20% of the nucleotides of the sense strand comprise a 2′-fluoro modification.
[1051] Embodiment I-44. The oligonucleotide of any one of Embodiments I-40-43, wherein about 25-35%, 25%, 26%, 27%, 28%, 29%, 30%, 31%, 32%, 33%, 34% or 35% of the nucleotides of the antisense strand comprise a 2′-fluoro modification.
[1052] Embodiment I-45. The oligonucleotide of any one of Embodiments I-40-44, wherein about 25-35%, 25%, 26%, 27%, 28%, 29%, 30%, 31%, 32%, 33%, 34% or 35% of the nucleotides of the oligonucleotide comprise a 2′-fluoro modification.
[1053] Embodiment I-46. The oligonucleotide of any one of Embodiments I-40-45, wherein the sense strand comprises 20 nucleotides with positions 1-20 from 5′ to 3′, wherein each of positions 8-11 comprise a 2′-fluoro modification.
[1054] Embodiment I-47. The oligonucleotide of any one of Embodiments I-40-45, wherein the sense strand comprises 20 nucleotides with positions 1-20 from 5′ to 3′, wherein each of positions 9-11 comprise a 2′-fluoro modification.
[1055] Embodiment I-48. The oligonucleotide of any one of Embodiments I-40-45, wherein the sense strand comprises 36 nucleotides with positions 1-36 from 5′ to 3′, wherein each of positions 8-11 comprise a 2′-fluoro modification.
[1056] Embodiment I-49. The oligonucleotide of any one of Embodiments I-40-45, wherein the sense strand comprises 36 nucleotides with positions 1-36 from 5′ to 3′, wherein each of positions 9-11 comprise a 2′-fluoro modification.
[1057] Embodiment I-50. The oligonucleotide of any one of Embodiments I-40-49, wherein the antisense strand comprises 22 nucleotides with positions 1-22 from 5′ to 3′, and wherein each of positions 2, 3, 4, 5, 7, 10 and 14 comprise a 2′-fluoro modification.
[1058] Embodiment I-51. The oligonucleotide of any one of Embodiments I-41-50, wherein the remaining nucleotides comprise a 2′-O-methyl modification except the nucleotide of the sense strand conjugated to the at least one lipid moiety.
[1059] Embodiment I-52. The oligonucleotide of any one of the preceding Embodiments, wherein the oligonucleotide comprises at least one modified internucleotide linkage.
[1060] Embodiment I-53. The oligonucleotide of Embodiment I-52, wherein the at least one modified internucleotide linkage is a phosphorothioate linkage.
[1061] Embodiment I-54. The oligonucleotide of Embodiment I-53, wherein the antisense strand comprises a phosphorothioate linkage (i) between positions 1 and 2, and between positions 2 and 3; or (ii) between positions 1 and 2, between positions 2 and 3, and between positions 3 and 4, wherein positions are numbered 1-4 from 5′ to 3′.
[1062] Embodiment I-55. The oligonucleotide of Embodiment I-53 or 54, wherein the antisense strand is 22 nucleotides in length, and wherein the antisense strand comprises a phosphorothioate linkage between positions 20 and 21 and between positions 21 and 22, wherein positions are numbered 1-22 from 5′ to 3′.
[1063] Embodiment I-56. The oligonucleotide of any one of Embodiments I-53-55, wherein the sense strand comprises a phosphorothioate linkage between position 1 and 2, wherein positions are numbered 1-2 from 5′ to 3′.
[1064] Embodiment I-57. The oligonucleotide of any one of Embodiments I-53-56, wherein the sense strand is 20 nucleotides in length, and wherein the sense strand comprises a phosphorothioate linkage between positions 18 and 19, and between positions 19 and 20, wherein positions are numbered 1-22 from 5′ to 3′.
[1065] Embodiment I-58. The oligonucleotide of any one of Embodiments I-1-57, wherein the antisense strand comprises a phosphorylated nucleotide at the 5′ terminus, wherein the phosphorylated nucleotide is selected from uridine and adenosine.
[1066] Embodiment I-59. The oligonucleotide of Embodiment I-58, wherein the phosphorylated nucleotide is uridine.
[1067] Embodiment I-60. The oligonucleotide of any one of the preceding Embodiments, wherein the 4′-carbon of the sugar of the 5′-nucleotide of the antisense strand comprises a phosphate analog.
[1068] Embodiment I-61. The oligonucleotide of Embodiment I-60, wherein the phosphate analog is oxymethyl phosphonate, vinyl phosphonate or malonyl phosphonate.
[1069] Embodiment I-62. The oligonucleotide of any one of Embodiments I-1-61, wherein the region of complementary is fully complementary to the astrocyte mRNA target sequence at nucleotide positions 2-8 of the antisense strand, wherein nucleotide positions are numbered 5′ to 3′.
[1070] Embodiment I-63. The oligonucleotide of any one of Embodiments I-1-61, wherein the region of complementary is fully complementary to the astrocyte mRNA target sequence at nucleotide positions 2-11 of the antisense strand, wherein nucleotide positions are numbered 5′ to 3′.
[1071] Embodiment I-64. The oligonucleotide of any one of Embodiments I-1-63, wherein the oligonucleotide is a Dicer substrate.
[1072] Embodiment I-65. The oligonucleotide of any one of Embodiments I-1-63, wherein the oligonucleotide is a Dicer substrate that, upon endogenous Dicer processing, yields double-stranded nucleic acids of 19-21 nucleotides in length capable of reducing an astrocyte mRNA expression in a mammalian cell.
[1073] Embodiment I-66. The oligonucleotide of any one of Embodiments I-1-65, wherein the astrocyte mRNA target sequence is located in a region of the central nervous system (CNS).
[1074] Embodiment I-67. The oligonucleotide of Embodiment I-66, wherein the region of the CNS is selected from the spinal cord, lumbar spinal cord, thoracic spinal cord, cervical spinal cord, medulla, hippocampus, cerebellum, hypothalamus, frontal cortex, and a combination thereof.
[1075] Embodiment I-68. The oligonucleotide of any one of Embodiments I-1-67, wherein the oligonucleotide reduces expression of a target mRNA in an astrocyte or population of astrocytes in vitro and/or in vivo.
[1076] Embodiment I-69. A pharmaceutical composition comprising the oligonucleotide of any one of Embodiments I-1-68, and a pharmaceutically acceptable carrier, delivery agent or excipient.
[1077] Embodiment I-70. A method for treating a subject having a disease, disorder or condition associated with expression of an astrocyte mRNA, the method comprising administering to the subject a therapeutically effective amount of the oligonucleotide of any one of Embodiments I-1-68 or the pharmaceutical composition of Embodiment I-69, thereby treating the subject.
[1078] Embodiment I-71. A method of delivering an oligonucleotide to an astrocyte or a population of astrocytes in a subject, the method comprising administering the pharmaceutical composition of Embodiment I-69 to the subject.
[1079] Embodiment I-72. The method of Embodiment I-71, wherein the astrocyte or a population of astrocytes is located in a region of the CNS.
[1080] Embodiment I-73. The method of Embodiment I-72, wherein the region of the CNS is selected from the spinal cord, lumbar spinal cord, thoracic spinal cord, cervical spinal cord, medulla, hippocampus, cerebellum, hypothalamus, frontal cortex, and a combination thereof.
[1081] Embodiment I-74. A method for reducing expression of an astrocyte mRNA in a cell, a population of cells or a subject, the method comprising the step of:
[1082] i. contacting the cell or the population of cells with the oligonucleotide of any one of Embodiments I-1 to 68, or the pharmaceutical composition of Embodiment I-69, optionally wherein the cell or population of cells is an astrocyte or a population of astrocytes; or
[1083] ii. administering to the subject the oligonucleotide of any one of Embodiments I-1 to 68, or the pharmaceutical composition of Embodiment I-69.
[1084] Embodiment I-75. The method of Embodiment I-74, wherein reducing expression of the astrocyte mRNA comprises reducing an amount or level of mRNA, an amount or level of protein, or both.
[1085] Embodiment I-76. The method of Embodiment I-74 or 75, wherein the subject has a disease, disorder or condition associated with expression of the astrocyte mRNA.
[1086] Embodiment I-77. The method of any one of Embodiments I-74-76, wherein the cell or population of cells is located in a region of the CNS.
[1087] Embodiment I-78. The method of Embodiment I-77, wherein the region of the CNS is selected from the spinal cord, lumbar spinal cord, thoracic spinal cord, cervical spinal cord, medulla, hippocampus, cerebellum, hypothalamus, frontal cortex, and a combination thereof.
[1088] Embodiment I-79. The method of any one of Embodiments I-70-78, wherein administering is intrathecal.
[1089] Embodiment I-80. A method of reducing expression of a target mRNA expressed in an astrocyte in a tissue of the CNS of a subject, comprising administering to the subject a double-stranded oligonucleotide comprising an antisense strand of 15-30 nucleotides in length and a sense strand of 15-50 nucleotides in length, wherein the antisense and sense strands form a duplex region of 15-30 base pairs, wherein the antisense strand comprises a region of complementarity to a target sequence in the target mRNA, and wherein the sense strand comprises at least one lipid moiety conjugated to a nucleotide of the sense strand.
[1090] Embodiment I-81. The method of Embodiment I-80, wherein the lipid moiety is a C16 hydrocarbon.
[1091] Embodiment I-82. The method of any one of Embodiments I-80-81, wherein the oligonucleotide is blunt-ended at the 3′ terminus of the oligonucleotide.
[1092] Embodiment I-83. The method of Embodiment I-82, wherein the sense strand is 22-24 nucleotides.
[1093] Embodiment I-84. The method of Embodiment I-83, wherein the tissue is the spinal cord, wherein the at least one lipid moiety is conjugated to a nucleotide at position 1, position 4, position 8, position 12, position 13, position 18 or position 20 of the sense strand, and wherein positions are numbered 5′ to 3′
[1094] Embodiment I-85. The method of Embodiment I-83, wherein the tissue is the medulla, wherein the at least one lipid moiety is conjugated to a nucleotide at position 1, position 4, position 8, position 12, position 13, position 18 or position 20 of the sense strand, and wherein positions are numbered 5′ to 3′.
[1095] Embodiment I-86. The method of Embodiment I-83, wherein the tissue is the cerebellum, wherein the at least one lipid moiety is conjugated to a nucleotide at position 4, position 12, position 13, position 18 or position 20 of the sense strand, and wherein positions are numbered 5′ to 3′.
[1096] Embodiment I-87. The method of Embodiment I-83, wherein the tissue is the hypothalamus, wherein the at least one lipid moiety is conjugated to a nucleotide at position 1, position 4, position 12, position 13, position 18 or position 20 of the sense strand, and wherein positions are numbered 5′ to 3.
[1097] Embodiment I-88. The method of Embodiment I-83, wherein the tissue is the frontal cortex, wherein the at least one lipid moiety is conjugated to a nucleotide at position 4 of the sense strand, and wherein positions are numbered 5′ to 3′.
[1098] Embodiment I-89. The method of any one of Embodiments I-80-81, wherein the sense strand comprises a stem-loop at the 3′ end, wherein the stem-loop comprises a nucleotide sequence represented by the formula: 5′-S1-L-S2-3′, wherein S1 is complementary to S2, and wherein L forms a loop between S1 and S2.
[1099] Embodiment I-90. The method of Embodiment I-89, wherein the sense strand is 36-38 nucleotides.
[1100] Embodiment I-91. The method of Embodiment I-90, wherein the tissue is the spinal cord, wherein the at least one lipid moiety is conjugated to a nucleotide at position 1, position 4, position 8, position 12, position 13, position 18, position 20, position 23, position 28, position 29 or position 30 of the sense strand, and wherein positions are numbered 5′ to 3′.
[1101] Embodiment I-92. The method of Embodiment I-90, wherein the tissue is the medulla, wherein the at least one lipid moiety is conjugated to a nucleotide at position 1, position 4, position 18, position 20, position 23, position 28, position 29 or position 30 of the sense strand, and wherein positions are numbered 5′ to 3′.
[1102] Embodiment I-93. The method of Embodiment 1-90, wherein the tissue is the cerebellum, wherein the at least one lipid moiety is conjugated to a nucleotide at position 1, position 4, position 23, position 28, or position 29 of the sense strand, and wherein positions are numbered 5′ to 3′.
[1103] Embodiment I-94. The method of Embodiment I-90, wherein the tissue is the hypothalamus, wherein the at least one lipid moiety is conjugated to a nucleotide at position 1, position 4, position 12, position 13, position 18, position 20, position 23, position 28, position 29 or position 30 of the sense strand, and wherein positions are numbered 5′ to 3′.
[1104] Embodiment I-95. The method of Embodiment I-90, wherein the tissue is the frontal cortex, wherein the at least one lipid moiety is conjugated to a nucleotide at position 23 of the sense strand, and wherein positions are numbered 5′ to 3′.
[1105] Embodiment I-96. The method of any one of Embodiments I-70-95, wherein a single dose of the oligonucleotide or pharmaceutical composition reduces expression of the astrocyte mRNA for at least 4 weeks, at least 8 weeks, at least 12 weeks, at least 23 weeks, at least 26 weeks, or at least 29 weeks.
[1106] Embodiment I-97. The method of any one of Embodiments I-70-95, wherein a single dose of the oligonucleotide or pharmaceutical composition reduces expression of the astrocyte mRNA for up to one year.
[1107] Embodiment I-98. A kit comprising the oligonucleotide of any one of Embodiments I-1-68, an optional pharmaceutically acceptable carrier, and a package insert comprising instructions for administration to a subject having a disease, disorder or condition associated with expression of an astrocyte mRNA.
[1108] Embodiment I-99. The kit of Embodiment I-98, wherein the package insert comprises instructions for intrathecal administration.
[1109] Embodiment I-100. Use of the oligonucleotide of any one of Embodiments I-1-68 or the pharmaceutical composition of Embodiment I-69, in the manufacture of a medicament for the treatment of a disease, disorder or condition associated with expression of an astrocyte mRNA.
[1110] Embodiment I-101. The oligonucleotide of any one of Embodiments I-1-68 or the pharmaceutical composition of Embodiment I-69, for use, or adaptable for use, in the treatment of a disease, disorder or condition associated with expression of an astrocyte mRNA.
[1111] Embodiment II-1. A double-stranded oligonucleotide comprising an antisense strand of 15-30 nucleotides in length and a sense strand of 15-50 nucleotides in length, wherein the antisense and sense strands form a duplex region of 15-30 base pairs, wherein the antisense strand comprises a region of complementarity to an oligodendrocyte mRNA target sequence, and wherein the sense strand comprises at least one lipid moiety conjugated to a nucleotide of the sense strand.
[1112] Embodiment II-2. The oligonucleotide of Embodiment II-1, wherein the lipid moiety is selected from

[chemical structure]

[chemical structure]

[1113] Embodiment II-3. The oligonucleotide of Embodiment II-1, wherein the lipid moiety is a hydrocarbon chain.
[1114] Embodiment II-4. The oligonucleotide of Embodiment II-3, wherein the hydrocarbon chain is a C8-C30 hydrocarbon chain.
[1115] Embodiment II-5. The oligonucleotide of Embodiment II-3 or 4, wherein the hydrocarbon chain is a C16 hydrocarbon chain.
[1116] Embodiment II-6. The oligonucleotide of Embodiment II-5 wherein the C16 hydrocarbon chain is represented by

[chemical structure]

[1117] Embodiment II-7. The oligonucleotide of any one of Embodiments II-1-6, wherein the lipid moiety is conjugated to the 2′ carbon of the ribose ring of the nucleotide.
[1118] Embodiment II-8. The oligonucleotide of any one of Embodiments II-1-7, wherein the oligonucleotide is blunt ended.
[1119] Embodiment II-9. The oligonucleotide of Embodiment II-8, wherein the oligonucleotide is blunt ended at the 3′ terminus of the oligonucleotide.
[1120] Embodiment II-10. The oligonucleotide of any one of Embodiments II-1-7, wherein the oligonucleotide comprises a blunt end.
[1121] Embodiment II-11. The oligonucleotide of Embodiment II-11, wherein the blunt end comprises the 3′ terminus of the sense strand
[1122] Embodiment II-12. The oligonucleotide of any one of Embodiments II-8-11, wherein the sense strand is 20-22 nucleotides.
[1123] Embodiment II-13. The oligonucleotide of Embodiment II-12, wherein the at least one lipid moiety is conjugated to a nucleotide at position 1, position 4, position 8, position 12, position 13, position 18, or position 20 of the sense strand, wherein positions are numbered 5′ to 3′.
[1124] Embodiment II-14. The oligonucleotide of Embodiment II-12, wherein the oligodendrocyte mRNA target is expressed in the spinal cord, wherein the at least one lipid moiety is conjugated to a nucleotide at position 1, position 2, position 3, position 5, position 6, position 7, position 9, position 13, position 14, position 15, position 17, position 19, or position 20 of the sense strand, and wherein positions are numbered 5′ to 3′.
[1125] Embodiment II-15. The oligonucleotide of Embodiment II-12, wherein the oligodendrocyte mRNA target is expressed in the medulla, wherein the at least one lipid moiety is conjugated to a nucleotide at position 2, position 7, position 9, position 14, position 15, or position 19 of the sense strand, and wherein positions are numbered 5′ to 3′.
[1126] Embodiment II-16. The oligonucleotide of Embodiment II-12, wherein the oligodendrocyte mRNA target is expressed in the hippocampus, wherein the at least one lipid moiety is conjugated to a nucleotide at position 3 of the sense strand, and wherein positions are numbered 5′ to 3′.
[1127] Embodiment II-17. The oligonucleotide of Embodiment II-12, wherein the oligodendrocyte mRNA target is expressed in the frontal cortex, wherein the at least one lipid moiety is conjugated to a nucleotide at position 14 of the sense strand, and wherein positions are numbered 5′ to 3′.
[1128] Embodiment II-18. The oligonucleotide of Embodiment II-12, wherein the oligodendrocyte mRNA target is expressed in the hypothalamus, wherein the at least one lipid moiety is conjugated to a nucleotide at position 7 of the sense strand, and wherein positions are numbered 5′ to 3′.
[1129] Embodiment II-19. The oligonucleotide of any one of Embodiments II-1-7, wherein the sense strand comprises a stem-loop at the 3′ end, wherein the stem-loop comprises a nucleotide sequence represented by the formula: 5′-S1-L-S2-3′, wherein S1 is complementary to S2, and wherein L forms a loop between S1 and S2.
[1130] Embodiment II-20. The oligonucleotide of any one of Embodiments II-1-7 and 19, wherein the sense strand is 36-38 nucleotides.
[1131] Embodiment II-21. The oligonucleotide of Embodiment II-19 or 20, wherein the at least one lipid moiety is conjugated to a nucleotide of the stem-loop or a nucleotide proximal to the stem-loop.
[1132] Embodiment II-22. The oligonucleotide of Embodiment II-21, wherein the nucleotide proximal to the stem-loop is located 1-3 nucleotides from the 5′ end of the stem-loop.
[1133] Embodiment II-23. The oligonucleotide of Embodiment II-20, wherein the oligodendrocyte mRNA target is expressed in the spinal cord, wherein the at least one lipid moiety is conjugated to a nucleotide at position 2, position 3, position 6, position 13, position 14, position 15, position 19, position 20, position 23, position 28, position 29 or position 30 of the sense strand, and wherein positions are numbered 5′ to 3′.
[1134] Embodiment II-24. The oligonucleotide of Embodiment II-20, wherein the oligodendrocyte mRNA target is expressed in the medulla, wherein the at least one lipid moiety is conjugated to a nucleotide at position 19, position 20, position 23 or position 28 of the sense strand, and wherein positions are numbered 5′ to 3′.
[1135] Embodiment II-25. The oligonucleotide of Embodiment II-20, wherein the oligodendrocyte mRNA target is expressed in the hippocampus, wherein the at least one lipid moiety is conjugated to a nucleotide at position 2 of the sense strand, and wherein positions are numbered 5′ to 3′.
[1136] Embodiment II-26. The oligonucleotide of Embodiment II-20, wherein the oligodendrocyte mRNA target is expressed in the frontal cortex, wherein the at least one lipid moiety is conjugated to a nucleotide at position 14, position 15, position 19, position 20, position 23, position 28, position 29 or position 30 of the sense strand, and wherein positions are numbered 5′ to 3′.
[1137] Embodiment II-27. The oligonucleotide of any one of Embodiments II-1-26, wherein the antisense strand is 22-24 nucleotides.
[1138] Embodiment II-28. The oligonucleotide of any one of Embodiments II-1-27, wherein the duplex region is 20-22 base pairs.
[1139] Embodiment II-29. The oligonucleotide of any one of Embodiments II-1-28, wherein the antisense strand comprises a 1-4 nucleotide overhang at the 3′ terminus.
[1140] Embodiment II-30. The oligonucleotide of Embodiment II-29, wherein the overhang comprises purine nucleotides.
[1141] Embodiment II-31. The oligonucleotide of Embodiment II-29 or 30, wherein the overhang sequence is 2 nucleotides in length.
[1142] Embodiment II-32. The oligonucleotide of Embodiment II-30 or 31, wherein the overhang is selected from AA, GG, AG, and GA.
[1143] Embodiment II-33. The oligonucleotide of Embodiment II-32, wherein the overhang is GG.
[1144] Embodiment II-34. The oligonucleotide of any one of Embodiments II-1-33, wherein the region of complementarity is complementary to at least 15 consecutive nucleotides of the oligodendrocyte mRNA target sequence.
[1145] Embodiment II-35. The oligonucleotide of any one of Embodiments II-1-34, wherein the region of complementarity is complementary to 19 consecutive nucleotides of the oligodendrocyte mRNA target sequence.
[1146] Embodiment II-36. The oligonucleotide of any one of Embodiments II-1-35, wherein the region of complementarity is fully complementary to the oligodendrocyte mRNA target sequence.
[1147] Embodiment II-37. The oligonucleotide of any one of Embodiments II-1-35, wherein the region of complementarity is partially complementary to the oligodendrocyte mRNA target sequence.
[1148] Embodiment II-38. The oligonucleotide of Embodiment II-37, wherein the region of complementarity comprises no more than four mismatches to the oligodendrocyte mRNA target sequence.
[1149] Embodiment II-39. The oligonucleotide of any one of Embodiments II-1-38, wherein the oligonucleotide comprises at least one modified nucleotide.
[1150] Embodiment II-40. The oligonucleotide of Embodiment II-39, wherein the modified nucleotide comprises a 2′-modification.
[1151] Embodiment II-41. The oligonucleotide of Embodiment II-40, wherein each of the nucleotides of the sense strand and the antisense strand comprise a 2′-modification except the nucleotide of the sense strand conjugated to the at least one lipid moiety.
[1152] Embodiment II-42. The oligonucleotide of Embodiment II-40 or 41, wherein the 2′-modification is a modification selected from 2′-aminoethyl, 2′-fluoro, 2′-O-methyl, 2′-O-methoxyethyl, and 2′-deoxy-2′-fluoro-β-d-arabinonucleic acid.
[1153] Embodiment II-43. The oligonucleotide of any one of Embodiments II-40-42, wherein about 10-20%, 10%, 11%, 12%, 13%, 14% 15%, 16%, 17%, 18%, 19% or 20% of the nucleotides of the sense strand comprise a 2′-fluoro modification.
[1154] Embodiment II-44. The oligonucleotide of any one of Embodiments II-40-43, wherein about 25-35%, 25%, 26%, 27%, 28%, 29%, 30%, 31%, 32%, 33%, 34% or 35% of the nucleotides of the antisense strand comprise a 2′-fluoro modification.
[1155] Embodiment II-45. The oligonucleotide of any one of Embodiments II-40-44, wherein about 25-35%, 25%, 26%, 27%, 28%, 29%, 30%, 31%, 32%, 33%, 34% or 35% of the nucleotides of the oligonucleotide comprise a 2′-fluoro modification.
[1156] Embodiment II-46. The oligonucleotide of any one of Embodiments II-40-45, wherein the sense strand comprises 20 nucleotides with positions 1-20 from 5′ to 3′, wherein each of positions 8-11 comprise a 2′-fluoro modification.
[1157] Embodiment II-47. The oligonucleotide of any one of Embodiments II-40-45, wherein the sense strand comprises 20 nucleotides with positions 1-20 from 5′ to 3′, wherein each of positions 9-11 comprise a 2′-fluoro modification.
[1158] Embodiment II-48. The oligonucleotide of any one of Embodiments II-40-45, wherein the sense strand comprises 36 nucleotides with positions 1-36 from 5′ to 3′, wherein each of positions 8-11 comprise a 2′-fluoro modification.
[1159] Embodiment II-49. The oligonucleotide of any one of Embodiments II-40-45, wherein the sense strand comprises 36 nucleotides with positions 1-36 from 5′ to 3′, wherein each of positions 9-11 comprise a 2′-fluoro modification.
[1160] Embodiment II-50. The oligonucleotide of any one of Embodiments II-40-49, wherein the antisense strand comprises 22 nucleotides with positions 1-22 from 5′ to 3′, and wherein each of positions 2, 3, 4, 5, 7, 10 and 14 comprise a 2′-fluoro modification.
[1161] Embodiment II-51. The oligonucleotide of any one of Embodiments II-41-50, wherein the remaining nucleotides comprise a 2′-O-methyl modification except the nucleotide of the sense strand conjugated to the at least one lipid moiety.
[1162] Embodiment II-52. The oligonucleotide of any one of the preceding Embodiments, wherein the oligonucleotide comprises at least one modified internucleotide linkage.
[1163] Embodiment II-53. The oligonucleotide of Embodiment II-52, wherein the at least one modified internucleotide linkage is a phosphorothioate linkage.
[1164] Embodiment II-54. The oligonucleotide of Embodiment II-53, wherein the antisense strand comprises a phosphorothioate linkage (i) between positions 1 and 2, and between positions 2 and 3; or (ii) between positions 1 and 2, between positions 2 and 3, and between positions 3 and 4, wherein positions are numbered 1-4 from 5′ to 3′.
[1165] Embodiment II-55. The oligonucleotide of Embodiment II-53 or 54, wherein the antisense strand is 22 nucleotides in length, and wherein the antisense strand comprises a phosphorothioate linkage between positions 20 and 21 and between positions 21 and 22, wherein positions are numbered 1-22 from 5′ to 3′.
[1166] Embodiment II-56. The oligonucleotide of any one of Embodiments II-53-55, wherein the sense strand comprises a phosphorothioate linkage between position 1 and 2, wherein positions are numbered 1-2 from 5′ to 3′.
[1167] Embodiment II-57. The oligonucleotide of any one of Embodiments II-53-56, wherein the sense strand is 20 nucleotides in length, and wherein the sense strand comprises a phosphorothioate linkage between positions 18 and 19, and between positions 19 and 20, wherein positions are numbered 1-22 from 5′ to 3′.
[1168] Embodiment II-58. The oligonucleotide of any one of Embodiments II-1-57, wherein the antisense strand comprises a phosphorylated nucleotide at the 5′ terminus, wherein the phosphorylated nucleotide is selected from uridine and adenosine.
[1169] Embodiment II-59. The oligonucleotide of Embodiment II-58, wherein the phosphorylated nucleotide is uridine.
[1170] Embodiment II-60. The oligonucleotide of any one of the preceding Embodiments, wherein the 4′-carbon of the sugar of the 5′-nucleotide of the antisense strand comprises a phosphate analog.
[1171] Embodiment II-61. The oligonucleotide of Embodiment II-60, wherein the phosphate analog is oxymethyl phosphonate, vinyl phosphonate or malonyl phosphonate.
[1172] Embodiment II-62. The oligonucleotide of any one of Embodiments II-1-61, wherein the region of complementary is fully complementary to the oligodendrocyte mRNA target sequence at nucleotide positions 2-8 of the antisense strand, wherein nucleotide positions are numbered 5′ to 3′.
[1173] Embodiment II-63. The oligonucleotide of any one of Embodiments II-1-61, wherein the region of complementary is fully complementary to the oligodendrocyte mRNA target sequence at nucleotide positions 2-11 of the antisense strand, wherein nucleotide positions are numbered 5′ to 3′.
[1174] Embodiment II-64. The oligonucleotide of any one of Embodiments II-1-63, wherein the oligonucleotide is a Dicer substrate.
[1175] Embodiment II-65. The oligonucleotide of any one of Embodiments II-1-63, wherein the oligonucleotide is a Dicer substrate that, upon endogenous Dicer processing, yields double-stranded nucleic acids of 19-21 nucleotides in length capable of reducing a oligodendrocyte mRNA expression in a mammalian cell.
[1176] Embodiment II-66. The oligonucleotide of any one of Embodiments II-1-65, wherein the oligodendrocyte mRNA target sequence is located in a region of the central nervous system (CNS).
[1177] Embodiment II-67. The oligonucleotide of Embodiment II-66, wherein the region of the CNS is selected from the frontal cortex, spinal cord, lumbar spinal cord, cervical spinal cord, thoracic spinal cord, medulla, cerebellum, hypothalamus, hippocampus, and a combination thereof.
[1178] Embodiment II-68. The oligonucleotide of any one of Embodiments II-1-67, wherein the oligonucleotide reduces expression of a target mRNA in an oligodendrocyte or population of oligodendrocytes in vitro and/or in vivo.
[1179] Embodiment II-69. A pharmaceutical composition comprising the oligonucleotide of any one of Embodiments II-1-68, and a pharmaceutically acceptable carrier, delivery agent or excipient.
[1180] Embodiment II-70. A method for treating a subject having a disease, disorder or condition associated with expression of an oligodendrocyte mRNA, the method comprising administering to the subject a therapeutically effective amount of the oligonucleotide of any one of Embodiments II-1-68 or the pharmaceutical composition of Embodiment II-69, thereby treating the subject.
[1181] Embodiment II-71. A method of delivering an oligonucleotide to an oligodendrocyte or a population of oligodendrocytes in a subject, the method comprising administering the pharmaceutical composition of Embodiment II-69 to the subject.
[1182] Embodiment II-72. The method of Embodiment II-71, wherein the oligodendrocyte or a population of oligodendrocytes is located in a region of the CNS.
[1183] Embodiment II-73. The method of Embodiment II-72 wherein the region of the CNS is selected from the frontal cortex, spinal cord, lumbar spinal cord, cervical spinal cord, thoracic spinal cord, medulla, cerebellum, hypothalamus, hippocampus, and a combination thereof.
[1184] Embodiment II-74. A method for reducing expression of an oligodendrocyte mRNA in a cell, a population of cells or a subject, the method comprising the step of:
[1185] i. contacting the cell or the population of cells with the oligonucleotide of any one of Embodiments II-1 to 68, or the pharmaceutical composition of Embodiment II-69, optionally wherein the cell or population of cells is an oligodendrocyte or a population of oligodendrocytes; or
[1186] ii. administering to the subject the oligonucleotide of any one of Embodiments II-1 to 68, or the pharmaceutical composition of Embodiment II-69.
[1187] Embodiment II-75. The method of Embodiment II-74, wherein reducing expression of the oligodendrocyte mRNA comprises reducing an amount or level of mRNA, an amount or level of protein, or both.
[1188] Embodiment II-76. The method of Embodiment II-74 or 75, wherein the subject has a disease, disorder or condition associated with expression of the oligodendrocyte mRNA.
[1189] Embodiment II-77. The method of any one of Embodiments II-74-76, wherein the cell or population of cells is located in a region of the CNS.
[1190] Embodiment II-78. The method of Embodiment II-77, wherein the region of the CNS is selected from the frontal cortex, spinal cord, lumbar spinal cord, cervical spinal cord, thoracic spinal cord, medulla, cerebellum, hypothalamus, hippocampus, and a combination thereof.
[1191] Embodiment II-79. The method of any one of Embodiments II-70-78, wherein administering is intrathecal.
[1192] Embodiment II-80. A method of reducing expression of a target mRNA expressed in an oligodendrocyte in a tissue of the CNS of a subject, comprising administering to the subject a double-stranded oligonucleotide comprising an antisense strand of 15-30 nucleotides in length and a sense strand of 15-50 nucleotides in length, wherein the antisense and sense strands form a duplex region of 15-30 base pairs, wherein the antisense strand comprises a region of complementarity to a target sequence in the target mRNA, and wherein the sense strand comprises at least one lipid moiety conjugated to a nucleotide of the sense strand.
[1193] Embodiment II-81. The method of Embodiment II-80, wherein the lipid moiety is a C16 hydrocarbon.
[1194] Embodiment II-82. The method of any one of Embodiments II-80-81, wherein the oligonucleotide is blunt-ended at the 3′ terminus of the oligonucleotide.
[1195] Embodiment II-83. The method of Embodiment II-82, wherein the sense strand is 22-24 nucleotides.
[1196] Embodiment II-84. The method of Embodiment II-83, wherein the tissue is the spinal cord, wherein the at least one lipid moiety is conjugated to a nucleotide at position 1, position 2, position 3, position 5, position 6, position 7, position 9, position 13, position 14, position 15, position 17, position 19, or position 20 of the sense strand, and wherein positions are numbered 5′ to 3′
[1197] Embodiment II-85. The method of Embodiment II-83, wherein the tissue is the medulla, wherein the at least one lipid moiety is conjugated to a nucleotide at position 2, position 7, position 14, position 15, or position 19 of the sense strand, and wherein positions are numbered 5′ to 3′.
[1198] Embodiment II-86. The method of Embodiment II-83, wherein the tissue is the hippocampus, wherein the at least one lipid moiety is conjugated to a nucleotide at position 3 of the sense strand, and wherein positions are numbered 5′ to 3′.
[1199] Embodiment II-87. The method of Embodiment II-83, wherein the tissue is the frontal cortex, wherein the at least one lipid moiety is conjugated to a nucleotide at position 14 of the sense strand, and wherein positions are numbered 5′ to 3′.
[1200] Embodiment II-88. The method of Embodiment II-83, wherein the tissue is the hypothalamus, wherein the at least one lipid moiety is conjugated to a nucleotide at position 7 of the sense strand, and wherein positions are numbered 5′ to 3′.
[1201] Embodiment II-89. The method of any one of Embodiments II-80-81, wherein the sense strand comprises a stem-loop at the 3′ end, wherein the stem-loop comprises a nucleotide sequence represented by the formula: 5′-S1-L-S2-3′, wherein S1 is complementary to S2, and wherein L forms a loop between S1 and S2.
[1202] Embodiment II-90. The method of any one of Embodiments II-80-81 and 89, wherein the sense strand is 36-38 nucleotides.
[1203] Embodiment II-91. The method of Embodiment II-89 or 90, wherein the at least one lipid moiety is conjugated to a nucleotide of the stem-loop or a nucleotide proximal to the stem-loop.
[1204] Embodiment II-92. The method of Embodiment II-91, wherein the nucleotide proximal to the stem-loop is located 1-3 nucleotides from the 5′ end of the stem-loop.
[1205] Embodiment II-93. The method of Embodiment II-90, wherein the tissue is the spinal cord, wherein the at least one lipid moiety is conjugated to a nucleotide at position 2, position 3, position 6, position 13, position 14, position 15, position 19, position 20, position 23, position 28, position 29 or position 30 of the sense strand, and wherein positions are numbered 5′ to 3′.
[1206] Embodiment II-94. The method of Embodiment II-90, wherein the tissue is the medulla, wherein the at least one lipid moiety is conjugated to a nucleotide at position 19, position 20, position 23 or position 28 of the sense strand, and wherein positions are numbered 5′ to 3′.
[1207] Embodiment II-95. The method of Embodiment II-90, wherein the tissue is the hippocampus, wherein the at least one lipid moiety is conjugated to a nucleotide at position 2 of the sense strand, and wherein positions are numbered 5′ to 3′.
[1208] Embodiment II-96. The method of Embodiment II-90, wherein the tissue is the frontal cortex, wherein the at least one lipid moiety is conjugated to a nucleotide at position 14, position 15, position 19, position 20, position 23, position 28, position 29 or position 30 of the sense strand, and wherein positions are numbered 5′ to 3′.
[1209] Embodiment II-97. A kit comprising the oligonucleotide of any one of Embodiments II-1-68, an optional pharmaceutically acceptable carrier, and a package insert comprising instructions for administration to a subject having a disease, disorder or condition associated with expression of an oligodendrocyte mRNA.
[1210] Embodiment II-98. The kit of Embodiment II-97, wherein the package insert comprises instructions for intrathecal administration.
[1211] Embodiment II-99. Use of the oligonucleotide of any one of Embodiments II-1-68 or the pharmaceutical composition of Embodiment II-69, in the manufacture of a medicament for the treatment of a disease, disorder or condition associated with expression of an oligodendrocyte mRNA.
[1212] Embodiment II-100. The oligonucleotide of any one of Embodiments II-1-68 or the pharmaceutical composition of Embodiment II-69, for use, or adaptable for use, in the treatment of a disease, disorder or condition associated with expression of an oligodendrocyte mRNA.

### EXAMPLES

### Example 1: Preparation of RNAi Oligonucleotides

### Oligonucleotide Synthesis and Purification

[1213] The oligonucleotides (RNAi oligonucleotides) described in the Examples were chemically synthesized using methods described herein. Generally, RNAi oligonucleotides were synthesized using solid phase oligonucleotide synthesis methods as described for 19-23mer RNAi oligonucleotides (see, e.g., Scaringe et al. (1990) NUCLEIC ACIDS RES. 18:5433-41 and Usman et al. (1987) J. AM. CHEM. SOC. 109:7845-45; see also, U.S. Pat. Nos. 5,804,683; 5,831,071; 5,998,203; 6,008,400; 6,111,086; 6,117,657; 6,353,098; 6,362,323; 6,437,117 and 6,469,158) in addition to using known phosphoramidite synthesis methodologies (see, e.g., Hughes and Ellington (2017) COLD SPRING HARB PERSPECT BIOL. 9(1):a023812; Beaucage S. L., Caruthers M. H. STUDIES ON NUCLEOTIDE CHEMISTRY V: Deoxynucleoside Phosphoramidites-A New Class of Key Intermediates for Deoxypolynucleotide Synthesis, TETRAHEDRON LETT. 1981; 22:1859-62. doi: 10.1016/S0040-4039(01)90461-7); PCT application No. PCT/US2021/42469 (each of which is incorporated herein by this reference)).

[1214] Individual RNA strands were synthesized and HPLC purified according to standard methods (Integrated DNA Technologies; Coralville, IA). For example, RNA oligonucleotides were synthesized using solid phase phosphoramidite chemistry, deprotected and desalted on NAP-5 columns (Amersham Pharmacia Biotech; Piscataway, NJ) using standard techniques (Damha & Olgivie (1993) METHODS MOL. BIOL. 20:81-114; Wincott et al. (1995) NUCLEIC ACIDS RES. 23:2677-84) and the phosphoramidite synthesis as shown below:

### Synthesis of 2-(2-((((6aR,8R,9R,9aR)-8-(6-benzamido-9H-purin-9-yl)-2,2,4,4-tetraisopropyltetrahydro-6H-furo[3,2-f][1,3,5,2,4]trioxadisilocin-9-yl)oxy)methoxy)ethoxy) ethan-1-ammonium formate (1-6)

[chemical structure]

[chemical structure]

[1215] A solution of compound 1-1 (25.00 g, 67.38 mmol) in 20 mL of DMF was treated with pyridine (11 mL, 134.67 mmol) and tetraisopropyldisiloxane dichloride (22.63 mL, 70.75 mmol) at 10° C. The resulting mixture was stirred at 25° C. for 3 h and quenched with 20% citric acid (50 mL). The aqueous layer was extracted with EtOAc (3×50 mL) and the combined organic layers were concentrated in vacuo. The crude residue was recrystallized from a mixture of MTBE and n-heptane (1:15, 320 mL) to afford compound 1-2 (37.20 g, 90%) as a white oily solid.

[1216] A solution of compound 1-2 (37.00 g, 60.33 mmol) in 20 mL of DMSO was treated with AcOH (20 mL, 317.20 mmol) and Ac₂O (15 mL, 156.68 mmol). The mixture was stirred at 25° C. for 15 h. The reaction was diluted with EtOAc (100 mL) and quenched with sat. K₂CO₃ (50 mL). The aqueous layer was extracted with EtOAc (3×50 mL). The combined organic layers were concentrated and recrystallized with ACN (30 mL) to afford compound 1-3 (15.65 g, 38.4%) as a white solid.

[1217] A solution of compound 1-3 (20.00 g, 29.72 mmol) in 120 mL of DCM was treated with Fmoc-amino-ethoxy ethanol (11.67 g, 35.66 mmol) at 25° C. The mixture was stirred to afford a clear solution and then treated with 4 Å molecular sieves (20.0 g), N-iodosuccinimide (8.02 g, 35.66 mmol), and TfOH (5.25 mL, 59.44 mmol). The mixture was stirred at 30° C. until the HPLC analysis indicated >95% consumption of compound 1-3. The reaction was quenched with TEA (6 mL) and filtered. The filtrate was diluted with EtOAc, washed with sat. NaHCO₃ (2×100 mL), sat. Na₂SO₃ (2×100 mL), and water (2×100 mL) and concentrated in vacuo to afford crude compound 1-4 (26.34 g, 93.9%) as a yellow solid, which was used directly for the next step without further purification.

[1218] A solution of compound 1-4 (26.34 g, 27.62 mmol) in a mixture of DCM/water (10:7, 170 mL) was treated with DBU (7.00 mL, 45.08 mmol) at 5° C. The mixture was stirred at 5-25° C. for 1 h. The organic layer was then separated, washed with water (100 mL), and diluted with DCM (130 mL). The solution was treated with fumaric acid (7.05 g, 60.76 mmol) and 4 Å molecular sieves (26.34 g) in four portions. The mixture was stirred for 1 h, concentrated, and recrystallized from a mixture of MTBE and DCM (5:1) to afford compound 1-6 (14.74 g, 62.9%) as a white solid: ¹H NMR (400 MHZ, d₆-DMSO) 8.73 (s, 1H), 8.58 (s, 1H), 8.15-8.02 (m, 2H), 7.65-7.60 (m, 1H), 7.59-7.51 (m, 2H), 6.52 (s, 2H), 6.15 (s, 1H), 5.08-4.90 (m, 3H), 4.83-4.78 (m, 1H), 4.15-3.90 (m, 3H), 3.79-3.65 (m, 2H), 2.98-2.85 (m, 6H), 1.20-0.95 (m, 28H).

### Synthesis of (2R,3R,4R,5R)-5-(6-benzamido-9H-purin-9-yl)-2-((bis(4-methoxyphenyl)(phenyl)methoxy)methyl)-4-((2-(2-[lipid]-amidoethoxy)ethoxy)methoxy) tetrahydrofuran-3-yl (2-cyanoethyl) diisopropylphosphoramidite (2-4a to 2-4e)

[chemical structure]

[chemical structure]

[1219] A solution of compound 1-6 (50.00 g, 59.01 mmol) in 150 mL of 2-methyltetrahydrofuran was washed with ice cold aqueous K₂HPO₄ (6%, 100 mL) and brine (20%, 2×100 mL). The organic layer was separated and treated with hexanoic acid (10.33 mL, 82.61 mmol), HATU (33.66 g, 88.52 mmol), and DMAP (10.81 g, 147.52 mmol) at 0° C. The resulting mixture was warmed to 25° C. and stirred for 1 h. The solution was washed with water (2×100 mL), brine (100 mL), and concentrated in vacuo to afford a crude residue. Flash chromatography on silica gel (1:1 hexanes/acetone) gave compound 2-1a (34.95 g, 71.5%) as a white solid.

[1220] A mixture of compound 2-1a (34.95 g, 42.19 mmol) and TEA (9.28 mL, 126.58 mmol) in 80 mL of THF was treated with triethylamine trihydrofluoride (20.61 mL, 126.58 mmol) dropwise at 10° C. The mixture was warmed to 25° C. and stirred for 2 h. The reaction was concentrated, dissolved in DCM (100 mL), and washed with sat. NaHCO₃ (5×20 mL) and brine (50 mL). The organic layer was concentrated in vacuo to afford crude compound 2-2a (24.72 g, 99%), which was used directly for the next step without further purification.

[1221] A solution of compound 2-2a (24.72 g, 42.18 mmol) in 50 mL of DCM was treated with N-methylmorpholine (18.54 mL, 168.67 mmol) and DMTr-Cl (15.69 g, 46.38 mmol). The mixture was stirred at 25° C. for 2 h and quenched with sat. NaHCO₃ (50 mL). The organic layer was separated, washed with water, concentrated to afford a slurry crude. Flash chromatography on silica gel (1:1 hexanes/acetone) gave compound 2-3a (30.05 g, 33.8 mmol, 79.9%) as a white solid.

[1222] A solution of compound 2-3a (25.00 g, 28.17 mmol) in 50 mL of DCM was treated with N-methylmorpholine (3.10 mL, 28.17 mmol) and tetrazole (0.67 mL, 14.09 mmol) under nitrogen atmosphere. Bis(diisopropylamino) chlorophosphine (9.02 g, 33.80 mmol) was added to the solution dropwise and the resulting mixture was stirred at 25° C. for 4 h. The reaction was quenched with water (15 mL), and the aqueous layer was extracted with DCM (3×50 mL). The combined organic layers were washed with sat. NaHCO₃ (50 mL), concentrated to afford a crude solid that was recrystallized from a mixture of DCM/MTBE/n-hexane (1:4:40) to afford compound 2-4a (25.52 g, 83.4%) as a white solid: ¹H NMR (400 MHz, d₆-DMSO) 11.25 (s, 1H), 8.65-8.60 (m, 2H), 8.09-8.02 (m, 2H), 7.71 (s, 1H), 7.67-7.60 (m, 1H), 7.59-7.51 (m, 2H), 7.38-7.34 (m, 2H), 7.30-7.25 (m, 7H), 6.85-6.79 (m, 4H), 6.23-6.20 (m, 1H), 5.23-5.14 (m, 1H), 4.80-4.69 (m, 3H), 4.33-4.23 (m, 2H), 3.90-3.78 (m, 1H), 3.75 (s, 6H), 3.74-3.52 (m, 3H), 3.50-3.20 (m, 6H), 3.14-3.09 (m, 2H), 3.09 (s, 1H), 2.82-2.80 (m, 1H), 2.65-2.60 (m, 1H), 2.05-1.96 (m, 2H), 1.50-1.39 (m, 2H), 1.31-1.10 (m, 14H), 1.08-1.05 (m, 2H), 0.85-0.79 (m, 3H); ³¹P NMR (162 MHZ, d₆-DMSO) 149.43, 149.18.

[1223] Compound 2-4b, 2-4c, 2-4d, and 2-4e were prepared using similar procedures described above for compound 2-4a. Compound 2-4b was obtained (25.50 g, 85.4%) as a white solid: ¹H NMR (400 MHZ, d₆-DMSO) 11.23 (s, 1H), 8.65-8.60 (m, 2H), 8.05-8.02 (m, 2H), 7.73-7.70 (m, 1H), 7.67-7.60 (m, 1H), 7.59-7.51 (m, 2H), 7.38-7.34 (m, 2H), 7.30-7.25 (m, 7H), 6.89-6.80 (m, 4H), 6.21-6.15 (m, 1H), 5.23-5.17 (m, 1H), 4.80-4.69 (m, 3H), 4.40-4.21 (m, 2H), 3.91-3.80 (m, 1H), 3.74 (s, 6H), 3.74-3.52 (m, 3H), 3.50-3.20 (m, 6H), 3.14-3.09 (m, 2H), 3.09 (s, 1H), 2.83-2.79 (m, 1H), 2.68-2.62 (m, 1H), 2.05-1.97 (m, 2H), 1.50-1.38 (m, 2H), 1.31-1.10 (m, 18H), 1.08-1.05 (m, 2H), 0.85-0.78 (m, 3H); ³¹P NMR (162 MHz, d₆-DMSO) 149.43, 149.19.

[1224] Compound 2-4c was obtained (36.60 g, 66.3%) as an off-white solid: ¹H NMR (400 MHz, d₆-DMSO) 11.22 (s, 1H), 8.64-8.59 (m, 2H), 8.05-8.00 (m, 2H), 7.73-7.70 (m, 1H), 7.67-7.60 (m, 1H), 7.59-7.51 (m, 2H), 7.38-7.34 (m, 2H), 7.30-7.25 (m, 7H), 6.89-6.80 (m, 4H), 6.21-6.15 (m, 1H), 5.25-5.17 (m, 1H), 4.80-4.69 (m, 3H), 4.40-4.21 (m, 2H), 3.91-3.80 (m, 1H), 3.74 (s, 6H), 3.74-3.50 (m, 3H), 3.50-3.20 (m, 6H), 3.14-3.09 (m, 2H), 3.09 (s, 1H), 2.83-2.79 (m, 1H), 2.68-2.62 (m, 1H), 2.05-1.99 (m, 2H), 1.50-1.38 (m, 2H), 1.33-1.12 (m, 38H), 1.08-1.05 (m, 2H), 0.86-0.80 (m, 3H); ³¹P NMR (162 MHz, d₆-DMSO) 149.42, 149.17.

[1225] Compound 2-4d was obtained (26.60 g, 72.9%) as an off-white solid: ¹H NMR (400 MHz, d₆-DMSO) 11.22 (s, 1H), 8.64-8.59 (m, 2H), 8.05-8.00 (m, 2H), 7.73-7.70 (m, 1H), 7.67-7.60 (m, 1H), 7.59-7.51 (m, 2H), 7.38-7.33 (m, 2H), 7.30-7.25 (m, 7H), 6.89-6.80 (m, 4H), 6.21-6.15 (m, 1H), 5.22-5.17 (m, 1H), 4.80-4.69 (m, 3H), 4.40-4.21 (m, 2H), 3.91-3.80 (m, 1H), 3.74 (s, 6H), 3.74-3.52 (m, 3H), 3.50-3.20 (m, 6H), 3.14-3.09 (m, 2H), 3.09 (s, 1H), 2.83-2.79 (m, 1H), 2.68-2.62 (m, 1H), 2.05-1.99 (m, 2H), 1.50-1.38 (m, 2H), 1.35-1.08 (m, 38H), 1.08-1.05 (m, 2H), 0.85-0.79 (m, 3H); ³¹P NMR (162 MHz, d₆-DMSO) 149.47, 149.22.

[1226] Compound 2-4e was obtained (38.10 g, 54.0%) as a white solid: ¹H NMR (400 MHZ, d₆-DMSO) 11.21 (s, 1H), 8.64-8.59 (m, 2H), 8.05-8.00 (m, 2H), 7.73-7.70 (m, 1H), 7.67-7.60 (m, 1H), 7.59-7.51 (m, 2H), 7.38-7.34 (m, 2H), 7.30-7.25 (m, 7H), 6.89-6.80 (m, 4H), 6.21-6.15 (m, 1H), 5.23-5.17 (m, 1H), 4.80-4.69 (m, 3H), 4.40-4.21 (m, 2H), 3.91-3.80 (m, 1H), 3.73 (s, 6H), 3.74-3.52 (m, 3H), 3.47-3.22 (m, 6H), 3.14-3.09 (m, 2H), 3.09 (s, 1H), 2.83-2.79 (m, 1H), 2.68-2.62 (m, 1H), 2.05-1.99 (m, 2H), 1.50-1.38 (m, 2H), 1.35-1.06 (m, 46H), 1.08-1.06 (m, 2H), 0.85-0.77 (m, 3H); ³¹P NMR (162 MHZ, d₆-DMSO) 149.41, 149.15.

[1227] The oligomers were purified using ion-exchange high performance liquid chromatography (IE-HPLC) on an Amersham Source 15Q column (1.0 cm×25 cm; Amersham Pharmacia Biotech) using a 15 min step-linear gradient. The gradient varied from 90:10 Buffers A:B to 52:48 Buffers A:B, where Buffer A is 100 mM Tris pH 8.5 and Buffer B is 100 mM Tris pH 8.5, 1 M NaCl. Samples were monitored at 260 nm and peaks corresponding to the full-length oligonucleotide species were collected, pooled, desalted on NAP-5 columns, and lyophilized.

[1228] The purity of each oligomer was determined by capillary electrophoresis (CE) on a Beckman PACE 5000 (Beckman Coulter, Inc.; Fullerton, CA). The CE capillaries have a 100 μm inner diameter and contain ssDNA 100R Gel (Beckman-Coulter). Typically, about 0.6 nmole of oligonucleotide was injected into a capillary, run in an electric field of 444 V/cm, and was detected by UV absorbance at 260 nm. Denaturing Tris-Borate-7 M-urea running buffer was purchased from Beckman-Coulter. Oligoribonucleotides were obtained that were at least 90% pure as assessed by CE for use in experiments described below. Compound identity was verified by matrix-assisted laser desorption ionization time-of-flight (MALDI-TOF) mass spectroscopy on a Voyager DE™ Biospectometry Work Station (Applied Biosystems; Foster City, CA) following the manufacturer's recommended protocol. Relative molecular masses of all oligomers were obtained, often within 0.2% of expected molecular mass.

### Preparation of Duplexes

[1229] Single strand RNA oligomers were resuspended (e.g., at 100 μM concentration) in duplex buffer consisting of 100 mM potassium acetate, 30 mM HEPES, pH 7.5. Complementary sense and antisense strands were mixed in equal molar amounts to yield a final solution of, for example, 50 μM duplex. Samples were heated to 100° C. for 5′ in RNA buffer (IDT) and were allowed to cool to room temperature before use. The RNAi oligonucleotides were stored at −20° C. Single strand RNA oligomers were stored lyophilized or in nuclease-free water at −80° C.

[1230] The synthesis methods described herein are used to generate the lipid-conjugated oligonucleotides described in the Examples below.

### Example 2: RNAi Oligonucleotide-lipid Conjugates Having a Stem-tetraloop at the 5′ Terminus of the Sense Strand Provide Reduced Expression of a Neuronal Target Gene in the CNS

[1231] To identify an RNAi oligonucleotide-lipid conjugate capable of reducing mRNA expression in neurons of CNS, a series of C16-conjugated RNAi oligonucleotides were generated by methods described in Example 1. Each oligonucleotide tested comprised an antisense strand having a region of complementarity to mRNA encoding Tubulin Beta 3 Class III (Tubb3). Tubb3 is a protein primarily expressed in neurons and is targeted herein to demonstrate delivery of lipid-conjugated RNAi oligonucleotides to neurons of the CNS.

[1232] Comparison was made to a parent oligonucleotide-lipid conjugate evaluated in previous studies that had the structure of Compound 1 as shown in FIG. 1A. Compound 1 contains a stem-loop at the 3′ terminus of the sense strand and a 2-nt overhang at the 3′ terminus of the antisense strand. The stem-loop contains a tetraloop having the nucleotide sequence 5′-GAAA-3′, a stem of 6-nt in length, and a C16 lipid conjugated at the second nucleotide of the tetraloop (i.e., the underlined “A” of 5′-GAAA-3′).

[1233] RNAi oligonucleotide-lipid conjugates that were evaluated in comparison to Compound 1 had structures according to Compounds 2-14 as shown in FIGS. 1A-1C. These structures contain the structural features described below:
[1234] (i) Compounds 2-5 as shown in FIG. 1A have a sense strand with a stem-loop at the 5′ terminus and a blunt-end at the 3′ terminus. The stem-loop has (a) a tetraloop with the sequence 5′-GAAA-3′; and (b) a stem of 6-nt in length (Compound 2) or 4-nt in length (Compounds 3-5). Compounds 2-4 have a C16 lipid positioned at the second nucleotide of the tetraloop (i.e., the underlined “A” of 5′-GAAA-3′) and Compound 5 has a C16 lipid at position 15 of the sense strand. The 5′ terminus of the sense strand for Compound 4 has a series of phosphorothioate (PS) backbone linkages (Compound 4).
[1235] (ii) Compounds 6-9 as shown in FIG. 1B contain a sense strand having a stem-loop at the 5′ terminus containing (a) a tetraloop with the sequence 5′-UACG-3′; (b) a stem of 4-nt in length (Compound 6) or 2-nt in length (Compounds 7-9); and (c) a C16 lipid conjugated at the second nucleotide of the tetraloop (i.e., the underlined “A” of the 5′-UACG-3′ tetraloop). Compounds 8 and 9 have a locked nucleic acid (LNA) at the base of the stem. The 3′ terminus of the sense strand has a blunt end (Compounds 6-8) or a 2-nucleotide truncation resulting in a 2-nt overhang at the 5′ terminus of the antisense strand (Compound 9).
[1236] (iii) Compound 10 as shown in FIG. 1C contains a sense strand having a stem-loop at the 5′ terminus and a blunt-end at the 3′ terminus. The stem-loop contains (a) a tetraloop with the sequence 5′-GAAA-3′; and (b) a stem of 6-nt in length. The 3′ terminus of the sense strand has a C16 lipid conjugate.
[1237] (iv) Compounds 11-13 as shown in FIG. 1C have a sense strand with a stem-loop at the 5′ terminus and a blunt-end at the 3′ terminus. The stem-loop has (a) a tetraloop with the sequence 5′-GAAA-3′; (b) a stem of 4-nt in length with 1-3 LNAs (Compounds 11-13 respectively) in the stem; and (c) a C16 lipid conjugate positioned at the second nucleotide of the tetraloop (i.e., the underlined “A” of 5′-GAAA-3′). The 3′ stem of Compound 13 contains an LNA with a thymine nucleobase rather than uridine nucleobase.
[1238] (v) Compound 14 as shown in FIG. 1C has a sense strand with a stem-loop at the 5′ terminus and a blunt-end at the 3′ terminus. The stem-loop has (a) a tetraloop with the sequence 5′-UACG-3′; (b) a stem of 2-nt in length composed of LNAs; and (c) a C16 lipid conjugate positioned at the second nucleotide of the tetraloop (i.e., the underlined “A” of 5′-UACG-3′). The 5′ terminus of the antisense strand was pre-trimmed to expose a 5′OH.

[1239] To evaluate the RNAi oligonucleotide-lipid conjugates, C57BL/6 female mice, 6-8 weeks old, were given a single lumbar intrathecal (i.t.) injection with 500 μg of oligonucleotide-lipid conjugate formulated in artificial cerebrospinal fluid (aCSF). The RNAi oligonucleotide-lipid conjugate administered in each treatment group is outlined in Table 1. Group A were control mice that received aCSF.

TABLE 1
Lipid-conjugated RNAi oligonucleotides

| | | | |
|---|---|---|---|
| | | Sense | Antisense |
| Group | Compound | SEQ ID NOs | SEQ ID NOs |

| # | ID | Unmod | Mod | Unmod | Mod |
|---|---|---|---|---|---|
| A | — | — | — | — | — |
| B | 1 | 310 | 338 | 324 | 352 |
| C | 2 | 311 | 339 | 325 | 353 |
| D | 3 | 312 | 340 | 326 | 354 |
| E | 4 | 313 | 341 | 327 | 355 |
| F | 5 | 314 | 342 | 328 | 356 |
| G | 6 | 315 | 343 | 329 | 357 |
| H | 7 | 316 | 344 | 330 | 358 |
| I | 8 | 317 | 345 | 331 | 359 |
| J | 9 | 318 | 346 | 332 | 360 |
| K | 10 | 319 | 347 | 333 | 361 |
| L | 11 | 320 | 348 | 334 | 362 |
| M | 12 | 321 | 349 | 335 | 363 |
| N | 13 | 322 | 350 | 336 | 364 |
| O | 14 | 323 | 351 | 337 | 365 |

[1240] Target knockdown was assessed 7 days post-injection. RNA was extracted from the lumbar spinal cord, lumbar dorsal root ganglion (DRG), medulla, hippocampus, and frontal cortex to determine murine Tubb3 mRNA levels by qPCR (normalized to endogenous housekeeping gene Rpl23). The qPCR was performed using PrimeTime™ qPCR Probe Assays. The percentage of murine Tubb3 mRNA remaining in the samples from treated mice was determined using the 2-ΔΔCt (“delta-delta Ct”) method (Livak and Schmittgen (2001) METHODS 25:402-408).

[1241] Percent TUBB3 mRNA expression in the frontal cortex and hippocampus is shown in FIGS. 2A-2B respectively. Knockdown was observed in these tissues for most of the treatment groups.

[1242] Percent TUBB3 mRNA expression in the cerebellum, brain stem, lumbar DRGs, and lumbar spinal cord is shown in FIGS. 2C-2F respectively. Knockdown was observed in cerebellum and brain stem for most of the treatment groups (FIG. 2C and FIG. 2D). All treatment groups demonstrated silencing of TUBB3 mRNA expression in lumbar DRGs and lumbar spinal cord (FIG. 2E and FIG. 2F). The presence of a stem-loop with high stability at the 5′ terminus of the sense strand increased knockdown of TUBB3 mRNA expression levels in several CNS tissues. Similarly, the presence of an LNA in the stem of the stem-loop structure increased silencing activity.

### Example 3: RNAi Oligonucleotide-Lipid Conjugates Structures with Overhangs in the Antisense Strand Yield Reduced Expression of a Neuronal Target Gene in the CNS

[1243] RNAi oligonucleotide-lipid conjugates with the structures of Compound 6-8 that resulted in efficient suppression of TUBB3 expression in CNS tissues as described in Example 2 were compared to TUBB3-targeting oligonucleotides-lipid conjugate structures with additional modifications.

[1244] RNAi oligonucleotide-lipid conjugates according to Compounds 7-9 were compared to those having the structures of Compounds 15-17 as shown in FIG. 3 and further described below. Each compounds has an antisense strand with a region of complementarity to TUBB3 mRNA.
[1245] (i) Compound 15 has a sense strand with a stem-loop at the 5′ terminus and a blunt-end at the 3′ terminus. The stem-loop contains (a) a tetraloop with the sequence 5′-UACG-3′; (b) a stem of 2-nt in length and having 1 LNA; and (iii) a C16 lipid conjugate at the second nucleotide of the tetraloop (i.e., the underlined “A” of 5′-UACG-3′). The 5′ terminus of the antisense strand was pre-trimmed to expose a 5′OH.
[1246] (ii) Compounds 16 has a sense strand with a 2-nt truncation at the 5′ terminus and a 2-nt truncation at the 3′ terminus (i.e., resulting in a 2-nt overhang on the 5′ terminus and 3′ terminus of the antisense strand). A C16 lipid conjugate was positioned at the 5′ terminus of the sense strand.
[1247] (iii) Compound 17 has a sense strand with a 2-nt truncation at the 5′ terminus (i.e., resulting in an antisense strand with an overhang at the 3′ terminus), a 3′ terminus with a blunt end, and a C16 lipid conjugate positioned at the 5′ terminus. The 5′ terminus of the antisense strand is truncated to 20-nt in length and pre-trimmed to expose a 5′OH.
[1248] (iv) Compound 18 has a sense strand with a 2-nt truncation at the 5′ terminus (i.e., resulting in an antisense strand with an overhang at the 3′ terminus) and a blunt-end at the 3′ terminus. A C16 lipid conjugate is positioned at the 5′ terminus of the sense strand.

[1249] To evaluate the RNAi oligonucleotide-lipid conjugates, 6-8 weeks old C57BL/6 female mice were given a single lumbar i.t. injection with 500 μg of oligonucleotide-lipid conjugate formulated in aCSF. The RNAi oligonucleotide-lipid conjugate administered in each animal group are indicated in Table 2. Group A were control mice that received aCSF.

TABLE 2
Lipid-conjugated RNAi oligonucleotide
administered to animal groups A-H

| | | | |
|---|---|---|---|
| | | Sense | Antisense |
| Group | Compound | SEQ ID NOs | SEQ ID NOs |

| # | ID | Unmod | Mod | Unmod | Mod |
|---|---|---|---|---|---|
| A | — | — | — | — | — |
| B | 7 | 316 | 344 | 330 | 358 |
| C | 8 | 317 | 345 | 331 | 359 |
| D | 9 | 318 | 346 | 332 | 360 |
| E | 15 | 369 | 383 | 376 | 390 |
| F | 16 | 370 | 384 | 377 | 391 |
| G | 17 | 371 | 385 | 378 | 392 |
| H | 18 | 372 | 386 | 379 | 393 |

[1250] Target knockdown was assessed 7 days post-injection. RNA was extracted from various CNS tissues to determine murine TUBB3 mRNA levels by qPCR (normalized to endogenous housekeeping gene Rpl23) as described in Example 2. Percent TUBB3 mRNA expression in the frontal cortex, hippocampus, medulla, cerebellum, lumbar DRGs, and lumbar spinal cord is shown in FIGS. 4A-4F respectively. Knockdown of TUBB3 mRNA expression was observed in each tissue for all or most of the treatment groups.

### Example 4: RNAi Oligonucleotide-Lipid Conjugates Having a Truncation at the 3′ Terminus of the Sense Strand Provide Enhanced Activity for Reducing Expression of a Neuronal Target Gene in the CNS

[1251] RNAi oligonucleotide-lipid conjugates designed to target TUBB3 mRNA and having a 2-nt overhang at the 3′ terminus of the antisense strand were prepared to evaluate the effect of truncations at the 3′ terminus of the sense strand on TUBB3 mRNA expression in the CNS.

[1252] Comparison was made to a parent RNAi oligonucleotide-lipid conjugate having the structure of Compound 18 as shown in FIG. 5. Compound 18 has an antisense strand with a 2-nt overhang at the 3′ terminus and a sense strand with a blunt end at the 3′ terminus of the sense strand and a C16 lipid conjugate at the 5′ terminus.

[1253] The RNAi oligonucleotide-lipid conjugates compared to Compound 18 had structures according to Compounds 19-28 as shown in FIG. 5.

[1254] Each of Compounds 19-26 has an antisense strand with a 2-nt overhang at the 3′ terminus and a sense strand with a C16 lipid conjugate at the 5′ terminus. Compounds 19-26 further contain an overhang at the 5′ terminus of the antisense strand that is 1-nt to 8-nt respectively. Compounds 27 and 28 respectively contain a 4-nt or 5-nt overhang at the 5′ terminus of the antisense strand with nucleotides at position 2-5 of the exposed overhang having PS-backbone linkages.

[1255] To evaluate the RNAi oligonucleotide-lipid conjugates, C57BL/6 female mice were given a single lumbar i.t. injection with 500 μg of oligonucleotide-lipid conjugate formulated in aCSF. The RNAi oligonucleotide-lipid conjugate administered in each animal group are indicated in Table 3. Group A were control mice that received aCSF.

| | | | |
|---|---|---|---|
| | | Sense | Antisense |
| Group | Compound | SEQ ID NOs | SEQ ID NOs |

| # | ID | Unmod | Mod | Unmod | Mod |
|---|---|---|---|---|---|
| A | — | — | — | — | — |
| B | 18 | 372 | 386 | 379 | 393 |
| C | 19 | 395 | 417 | 406 | 428 |
| D | 20 | 370 | 384 | 377 | 391 |
| E | 21 | 397 | 419 | 408 | 430 |
| F | 22 | 398 | 420 | 409 | 431 |
| G | 23 | 399 | 421 | 410 | 432 |
| H | 24 | 400 | 422 | 411 | 433 |
| I | 25 | 401 | 423 | 412 | 434 |
| J | 26 | 402 | 424 | 413 | 435 |
| K | 27 | 403 | 425 | 414 | 436 |
| L | 28 | 404 | 426 | 415 | 437 |

[1256] Target knockdown was assessed 7 days post-injection. RNA was extracted from various CNS tissues to determine murine TUBB3 mRNA levels by qPCR (normalized to endogenous housekeeping gene Rpl23) as described in Example 2. Percent TUBB3 mRNA expression in the cerebellum and lumbar DRGs are shown in FIGS. 6A-6B respectively.

[1257] It was observed that a truncation of up to 3-nt at the 3′ terminus of the sense strand was tolerated without diminishing TUBB3 mRNA suppression compared to Compound 18. See 3′p-3; 3′p-2; and 3′p-1 vs parent in FIGS. 6A-6B. In contrast, truncations of 4-nt or more at the 3′ terminus of the sense strand generally reduced, but did not abolish, reduction of target mRNA expression. See groups F-J vs B in FIGS. 6A-6B.

[1258] The effect of truncations at the 3′ terminus of the sense strand in combination with LNAs positioned within the senses strand was evaluated. The RNAi oligonucleotide-lipid conjugates that were evaluated had structures according to Compounds 29-38 as shown in FIG. 7.

[1259] Compound 29 has a structure equivalent to Compound 18, but includes an LNA at positions 2, 15, 16, 18, and 19 of the sense strand. Compounds 30-37 further include truncations at the 3′ terminus of the sense strand that are respectively 1-nt to 8-nt in length. Compound 38 contains a 4-nt truncation at the 3′ terminus of the sense strand and nucleotides at position 2-5 of the exposed overhang of the antisense containing a PS backbone linkage.

[1260] To evaluate the RNAi oligonucleotide-lipid conjugates, C57BL/6 female mice were given a single lumbar i.t. injection with 500 μg of oligonucleotide-lipid conjugate formulated in aCSF. The RNAi oligonucleotide-lipid conjugate administered in each animal group are indicated in Table 4. Group A were control mice that received aCSF.

TABLE 4
RNAi oligonucleotide-lipid conjugates
administered to animal groups A-L

| | | | |
|---|---|---|---|
| | | Sense | Antisense |
| Group | Compound | SEQ ID NOs | SEQ ID NOs |

| # | ID | Unmod | Mod | Unmod | Mod. |
|---|---|---|---|---|---|
| A | — | — | — | — | — |
| B | 18 | 372 | 386 | 379 | 393 |
| C | 29 | 439 | 461 | 450 | 472 |
| D | 30 | 440 | 462 | 451 | 473 |
| E | 31 | 441 | 463 | 452 | 474 |
| F | 32 | 442 | 464 | 453 | 475 |
| G | 33 | 443 | 465 | 454 | 476 |
| H | 34 | 444 | 466 | 455 | 477 |
| I | 35 | 445 | 467 | 456 | 478 |
| J | 36 | 446 | 468 | 457 | 479 |
| K | 37 | 447 | 469 | 458 | 480 |
| L | 38 | 448 | 470 | 489 | 481 |

[1261] Target knockdown was assessed 7 days post-injection. RNA was extracted from various CNS tissues to determine murine TUBB3 mRNA levels by qPCR (normalized to endogenous housekeeping gene Rpl23) as described in Example 2. Percent TUBB3 mRNA expression in the cerebellum and lumbar DRGs is shown in FIGS. 8A-8B respectively. Knockdown of TUBB3 mRNA expression was observed in both tissues for all or most of the treatment groups.

### Example 5: RNAi Oligonucleotide-Lipid Conjugates Evaluated for Reduction of Target Gene Expression in Ocular Tissue

[1262] To identify an RNAi oligonucleotide-lipid conjugate capable of reducing mRNA expression ocular tissues, a series of lipid-conjugated RNAi oligonucleotides were generated by methods described in Example 1. Each oligonucleotide tested had an antisense strand with a region of complementarity to mRNA encoding rat reticulon 4 (RTN4), which is a developmental neurite growth regulatory factor expressed in the eye.

[1263] Comparison was made to a parent RNAi oligonucleotide-lipid conjugate having a structure according to Compound 39 shown in FIG. 9. Compound 39 has an antisense strand with a 2-nt overhang at the 3-terminus and a blunt-end at the 5′ terminus. Compound 39 further contains a C16 lipid conjugate at the 5′ terminus of the sense strand.

[1264] The RNAi oligonucleotide-lipid conjugates evaluated had variation in the length of the aliphatic lipid, inclusion of LNAs, and truncation at the 5′ and/or 3′ termini of the sense strand. The structures of the oligonucleotide-lipid conjugates are shown in FIG. 9 and further detailed below:
[1265] (i) Compound 40 contains a sense strand having a 5-nt truncation at the 5′ terminus, a blunt-end at the 3′ terminus, and a C16 lipid conjugate at position 1 of the sense strand;
[1266] (ii) Compound 41 contains a sense strand having a 2-nt truncation at the 5′ terminus, a 2-nt truncation at the 3′ terminus, and a C16 lipid conjugate at position 1 of the sense strand;
[1267] (iii) Compound 42 contains a sense strand having a 5-nt truncation at the 5′ terminus, a 2-nt truncation at the 3′ terminus, and a C16 lipid conjugate at position 1 of the sense strand;
[1268] (iv) Compound 43 contains a sense strand having a 2-nt truncation at the 5′ terminus, a 2-nt truncation at the 3′ terminus, and a C18 lipid conjugate at position 1 of the sense strand;
[1269] (v) Compound 44 contains a sense strand having a 2-nt truncation at the 5′ terminus, a 2-nt truncation at the 3′ terminus, and a C22 lipid conjugate at position 1 of the sense strand;
[1270] (vi) Compound 45 contains a sense strand having a 5-nt truncation at the 5′ terminus, a blunt end at the 3′ terminus, and a C16 lipid conjugate at position 1 of the sense strand. The exposed overhang of the antisense strand contained PS linkages between neighboring residues;
[1271] (vii) Compounds 46-47 each contains a sense strand having a stem-loop at the 5′ terminus and a 2-nt truncation at the 3′ terminus. The stem-loop has (i) a tetraloop with the sequence 5′-UACG-3′; and (ii) a stem of 2 nt in length composed of LNAs. Compound 46 contains a C16 lipid conjugate at position 4 of the sense strand (i.e., the underlined “A” of the 5′-UACG-3′ tetraloop), whereas Compound 47 does not contain a lipid conjugate.
[1272] (viii) Compound 48 contains a sense strand having a 2-nt truncation at the 5′ terminus, a blunt end at the 3′ terminus, a C16 lipid conjugate at position 1, and LNAs at positions 2, 15, and 16; and
[1273] (ix) Compound 49 contains a sense strand having a 5-nt truncation at the 5′ terminus, a blunt end at the 3′ terminus, a C16 lipid conjugate at position 1, and LNAs at positions 2, 10, and 11.

[1274] To evaluate the RNAi oligonucleotide-lipid conjugates, Sprague-Dawley rats were given an intravitreal injection per eye, each with 250 μg of oligonucleotide-lipid conjugate. The RNAi oligonucleotide-lipid conjugate administered in each animal group is outlined in Table 5. Group A were control rats that received PBS.

TABLE 5
Lipid-conjugated RNAi oligonucleotides
administered to animal groups A-L

| | | | |
|---|---|---|---|
| | | Sense | Antisense |
| Group | Compound | SEQ ID NOs | SEQ ID NOs |

| # | ID | Unmod | Mod | Unmod | Mod |
|---|---|---|---|---|---|
| A | — | — | — | — | — |
| B | 39 | 482 | 504 | 493 | 515 |
| C | 40 | 483 | 505 | 494 | 516 |
| D | 41 | 484 | 506 | 495 | 517 |
| E | 42 | 485 | 507 | 496 | 518 |
| F | 43 | 486 | 508 | 497 | 519 |
| G | 44 | 487 | 509 | 498 | 520 |
| H | 45 | 488 | 510 | 499 | 521 |
| I | 46 | 489 | 511 | 500 | 522 |
| J | 47 | 490 | 512 | 501 | 523 |
| K | 48 | 491 | 513 | 502 | 524 |
| L | 49 | 492 | 514 | 503 | 525 |

[1275] Target knockdown was assessed 14 days post-injection. RNA was extracted from retina and optic nerve of one eye to determine rat RTN4 mRNA levels by qPCR (normalized to endogenous housekeeping gene PPIB). The qPCR was performed using PrimeTime™ qPCR Probe Assays, which consisted of a primer pair and fluorescently labeled 5′ nuclease probe specific to rat RTN4 mRNA. The percentage of rat RTN4 mRNA remaining in the samples from treated rats was determined using the 2-ΔΔCt (“delta-delta Ct”) method (Livak and Schmittgen (2001) METHODS 25:402-408). Percent RTN4 mRNA expression in the is shown in FIGS. 10A-10B respectively. Suppression of RTN4 mRNA expression in both retina and optic nerve tissues was observed for each of the treatment groups.

### Example 6: RNAi Oligonucleotide-GalNAc Conjugates Having Sense Strand Truncations and LNAs Evaluated for Target Knockdown in the Liver

[1276] RNAi oligonucleotide-GalNAc conjugates were prepared with a sense strand having a stem-tetraloop at the 3′ terminus, truncations at the 5′ terminus, and inclusion of LNAs on silencing of a target gene in the liver. Each oligonucleotide-lipid conjugate tested comprised an antisense strand having a region of complementarity to mRNA encoding Aldh2.

[1277] Comparison was made to a parent oligonucleotide-GalNAc conjugate having a sense strand with (a) no truncation at the 5′ terminus, thereby providing a 2-nt overhang at the 3′ terminus of the antisense strand; and (b) a nicked stem-loop at the 3′ terminus. The stem was 3 bp in length and composed of LNAs. The loop contained the sequence 5′-GAA-3′, with the a 2′-aminodiethoxymethanol-GalNAc at position 2 and 3 from the 5′ terminus (i.e., the underlined nucleotides of the 5′-GAA-3′ loop).

[1278] Oligonucleotide-GalNAc conjugates that were evaluated included those having the structures of Compounds 57 and 98-108 as shown in FIG. 10C and further described below:
[1279] (i) Compounds 57 and 98-100 contain a sense strand having (a) a 6-nt truncation at the 5′ terminus, thereby providing an 8-nt overhang at the 3′ terminus of the antisense strand; and (ii) a nicked stem-loop at the 3′ terminus identical to that of the parent oligonucleotide-GalNAc conjugate. Compound 98 contained an additional LNA at the 5′ terminus of the sense strand; Compound 99 contained two additional LNAs, one at the 5′ terminus and one 9-nt from the 5′ terminus of the sense strand; Compound 100 contained three additional LNAs, one at the 5′ terminus, and two positioned respectively 9-nt and 10-nt from the 5′ terminus of the sense strand; and Compound 101 contained five additional LNAs, one at the 5′ terminus, and four positioned respectively 9-nt, 10-nt, 12-nt, and 13-nt from the 5′ terminus of the sense strand.
[1280] (ii) Compounds 101-104 contain a sense strand having (a) a 7-nt truncation at the 5′ terminus, thereby providing an 9-nt overhang at the 3′ terminus of the antisense strand; and (ii) a nicked stem-loop at the 3′ terminus identical to that of the parent oligonucleotide-GalNAc conjugate. Compound 102 contained two additional LNAs, one at the 5′ terminus and one 8-nt from the 5′ terminus of the sense strand; Compound 103 contained three additional LNAs, one at the 5′ terminus, and two positioned respectively 8-nt and 9-nt from the 5′ terminus of the sense strand; and Compound 104 contained five additional LNAs, one at the 5′ terminus, and four positioned respectively 8-nt, 9-nt, 11-nt, and 12-nt from the 5′ terminus of the sense strand.
[1281] (ii) Compounds 105-108 contain a sense strand having (a) an 8-nt truncation at the 5′ terminus, thereby providing a 10-nt overhang at the 3′ terminus of the antisense strand; and (ii) a nicked stem-loop at the 3′ terminus identical to that of the parent oligonucleotide-GalNAc conjugate. Compound 106 contained two additional LNAs, one at the 5′ terminus and one 7-nt from the 5′ terminus of the sense strand; Compound 107 contained three additional LNAs, one at the 5′ terminus, and two positioned respectively 7-nt and 8-nt from the 5′ terminus of the sense strand; and Compound 108 contained five additional LNAs, one at the 5′ terminus, and four positioned respectively 7-nt, 8-nt, 10-nt, and 11-nt from the 5′ terminus of the sense strand.

[1282] To evaluate the RNAi oligonucleotide-GalNAc conjugates, mice were given a single intravenous (i.v.) injection of 0.5 mg/kg oligonucleotide-GalNAc conjugate formulated in PBS. The RNAi oligonucleotide-GalNAc conjugates administered for each of the treatment groups are outlined in Table 6. Group A were control mice that received PBS only.

TABLE 6
RNAi oligonucleotides-GalNAc conjugates
administered to animal groups A-N

| | | | |
|---|---|---|---|
| | | Sense | Antisense |
| Group | Compound | SEQ ID NOs | SEQ ID NOs |

| # | ID | Unmod | Mod | Unmod | Mod |
|---|---|---|---|---|---|
| A | — | — | — | — | — |
| B | parent | | | | |
| C | 57 | 193 | 217 | 205 | 229 |
| D | 98 | 194 | 218 | 206 | 230 |
| E | 99 | 195 | 219 | 207 | 231 |
| F | 100 | 196 | 220 | 208 | 232 |
| G | 101 | 197 | 221 | 209 | 233 |
| H | 102 | 198 | 222 | 210 | 234 |
| I | 103 | 199 | 223 | 211 | 235 |
| J | 104 | 200 | 224 | 212 | 236 |
| K | 105 | 201 | 225 | 213 | 237 |
| L | 106 | 202 | 226 | 214 | 238 |
| M | 107 | 203 | 227 | 215 | 239 |
| N | 108 | 204 | 228 | 216 | 240 |

[1283] Target knockdown was assessed 4 days post-injection. RNA was extracted from liver tissue and murine ALDH2 mRNA levels were determined by qPCR. Reduction of target mRNA was measured by qPCR using CFX384 TOUCH™ Real-Time PCR Detection System (BioRad Laboratories, Inc., Hercules, CA). All samples were normalized to the PBS treated control animals and plotted using GraphPad Prism software (GraphPad Software Inc., La Jolla, CA). Normalized ALDH2 mRNA expression in the liver relative to control as measured for each treatment group is shown in FIG. 10D. Suppression of ALDH2 mRNA expression was observed for most treatment groups.

### Example 7: RNAi Oligonucleotide-Lipid Conjugates for Reducing Expression of a Marker Highly Expressed by Non-Hepatocytes in the Liver

[1284] The liver has a cellular composition that is approximately 60% hepatocytes and 35% non-parenchymal cells (NPCs). The NPCs are composed of macrophages (also referred to as Kupffer cells), liver sinusoidal endothelial cells (LSECs), hepatic stellate cells, and other leukocytes. Macrophages in the liver function to maintain tissue homeostasis and respond to tissue injury (see Braet et al., Seminars in Cell Developmental Biology, 2017). It was evaluated if systemic delivery of RNAi oligonucleotide-lipid conjugates directed to a target gene highly expressed by liver NPC would induce silencing of the target gene in the liver. The target genes selected for evaluation included PECAM1 and CD68, which are highly expressed by NPCs of the liver (specifically LSECs and macrophages respectively) (see Ouyang et al (2014) Oncology Lett; Klein, et al (2021) Mol. Ther).

[1285] The RNAi oligonucleotide lipid conjugates evaluated had the structure of Compounds 120-122 as shown in FIG. 10E. Each contains a nicked stem-tetraloop at the 3′ terminus of the sense strand and a 2-nucleotide overhang at the 3′ terminus of the antisense strand. The stem-tetraloop contained a tetraloop having the nucleotide sequence 5′-GAAA-3′ and a stem of 6 nt in length. The 5′ terminus of the sense strand contains a C22 lipid conjugate. Compound 120 has an antisense strand having a region of complementarity to a first target sequence in an mRNA encoding PECAM1 (PECAM1-2392); Compound 121 has an antisense strand having a region of complementarity to a second target sequence in an mRNA encoding (PECAM1-3222); and Compound 122 has an antisense strand having a region of complementarity to a target sequence in an mRNA encoding CD68 (CD68-0815).

[1286] To evaluate the RNAi oligonucleotide-lipid conjugates targeting PECAM1 and CD68, female CD-1 mice were given a single subcutaneous injection of 30 mg/kg of oligonucleotide-lipid conjugate formulated in PBS. The RNAi oligonucleotide-lipid conjugates administered for each of the treatment groups are outlined in Table 7. Group A were control mice that received PBS only.

TABLE 7
RNAi oligonucleotides-GalNAc conjugates
administered to animal groups A-D

| Group | Compound | Sense SEQ ID NOS | | Antisense SEQ ID NOS | |
|---|---|---|---|---|---|
| # | ID | Unmod | Mod | Unmod | Mod |
| A | — | — | — | — | — |
| B | 120 | 1 | 7 | 4 | 10 |
| C | 121 | 2 | 8 | 5 | 11 |
| D | 122 | 3 | 9 | 6 | 12 |

[1287] Target knockdown was assessed 7 days post-injection. RNA was extracted from liver and extra-hepatic tissues and murine PECAM and CD68 mRNA levels were determined by qPCR (normalized to endogenous housekeeping gene Ppib). The percentage of murine mRNA remaining in the samples from treated mice was determined using the 2-ΔΔCt (“delta-delta Ct”) method (Livak and Schmittgen (2001) METHODS 25:402-408).

[1288] Percent PECAM1 and CD68 mRNA expression in the liver as measured for each treatment group is respectively shown in FIGS. 10F-10G. Reduction in expression of mRNA encoding PECAM1 was approximately 50% reduction for mice receiving Compound 120. Reduction in expression of mRNA encoding CD68 was approximately 75% for mice receiving Compound 122.

### Example 8: Effect of Dose on Silencing Mediated by an RNAi Oligonucleotide-Lipid Conjugate Targeting a Marker Abundantly Expressed by Liver Macrophages

[1289] The dose of the CD68-targeting RNAi oligonucleotide-lipid conjugate described in Example 7 was titrated to determine the effect on silencing of CD68 expression in liver macrophages. Specifically, the RNAi oligonucleotide-lipid conjugate evaluated had the structure of Compound 122 as shown in FIG. 10E.

[1290] The oligonucleotide-lipid conjugate was administered to female CD-1 mice as a single subcutaneous injection of 3-90 mg/kg of oligonucleotide-lipid conjugate formulated in PBS, as outlined in Table 8. Group A were control mice that received PBS only.

TABLE 8
Animal groups receiving an CD68-targeting RNAi
oligonucleotide-liver conjugate

| Group | Compound | Dose (mg/kg) |
|---|---|---|
| A | — | 0 |
| B | 122 | 3 |
| C | 122 | 10 |
| D | 122 | 30 |
| E | 122 | 90 |

[1291] Target knockdown was assessed 7 days post-injection. RNA was extracted from liver and extra-hepatic tissues and murine CD68 mRNA levels were determined by qPCR as described in Example 7. Liver was also collected for immunohistochemistry (IHC) analysis of CD68 protein levels. The liver was fixed in formalin and staining was performed using an CD68-specific primary antibody. (see, e.g., Li, et al (1996) Mod Pathol 9:982; Kunisch et al (2003) Annu Rheum Disc 63:774; Caffo et al (2005) Neurosurgery 57:551). CD68 expression was quantified for three randomly selected areas of the tissue and provided as an average.

[1292] As shown in FIG. 10H, a dose-dependent decrease in expression of CD68 mRNA was observed in liver tissue of mice administered Compound 122. An ED₅₀ of approximately 10 mg/kg was measured and a reduction of approximately 85% in CD68 mRNA expression was observed at the maximum dose (90 mg/kg).

[1293] As shown in FIG. 10I, a dose-dependent decrease in CD68 protein expression was also observed in liver tissue of mice administered Compound 122 as measured by IHC. A representative IHC image is shown in FIG. 10J, which demonstrates CD68 protein expression is abundant in liver macrophages. As shown in FIG. 10K, CD68 protein expression was diminished in liver with increased dosing of Compound 122. An ED₅₀ of approximately 3 mg/kg was measured and a reduction of approximately 93% in CD68 protein expression was observed at the maximum dose (90 mg/kg).

### Example 9: RNAi Oligonucleotide-lipid Conjugates for Reducing a Marker Highly Expressed by Macrophages in the Liver

[1294] RNAi oligonucleotide-lipid conjugates were evaluated to determine the effect of truncations at the 5′ and/or 3′ terminus of the sense strand on activity for silencing a target gene expressed by liver macrophages. Each oligonucleotide-lipid conjugate tested comprised an antisense strand having a region of complementarity to mRNA encoding CD68, which is a protein highly expressed in liver macrophages.

[1295] Comparison was made to an oligonucleotide-lipid conjugate evaluated in previous studies having the structure of Compound 58 as shown in FIG. 11A. Compound 58 contains a stem-loop at the 3′ terminus of the sense strand and a 2-nucleotide overhang at the 3′ terminus of the antisense strand. The stem-loop contains a tetraloop having the nucleotide sequence 5′-GAAA-3′, a stem of 6 nt in length, and a C22 lipid conjugated to the second nucleotide of the tetraloop (i.e., the underlined “A” of the 5′-GAAA-3′ tetraloop).

[1296] Oligonucleotide-lipid conjugates that were evaluated included those having the structures of Compounds 59-97 as shown in FIGS. 11A-11B and further described below:
[1297] (i) Compounds 59-64 as shown in FIG. 11A contain a sense strand having a blunt end at the 3′ terminus and a truncation at the 5′ terminus of 0-5 nucleotides respectively, yielding an antisense strand having an overhang at the 3′ terminus of 2-nt to 7-nt respectively. Each contains a C22 lipid conjugate positioned 14-nt from the 3′ terminus of the sense strand.
[1298] (ii) Compounds 65-69 as shown in FIG. 11A contain a sense strand having a 2-nt truncation at the 3′ terminus and a truncation at the 5′ terminus of 1-5 nucleotides respectively, yielding an antisense strand having an overhang at the 5′ terminus of 2-nt and at the 3′ terminus of 3-nt to 7-nt respectively. Each contains a C22 lipid conjugate positioned 12-nt from the 3′ terminus of the sense strand.
[1299] (iii) Compounds 70-74 as shown in FIG. 11A contain a sense strand having a 2-nt truncation at the 3′ terminus and a truncation at the 5′ terminus of 1-5 nucleotides respectively, yielding an antisense strand having an overhang at the 5′ terminus of 2-nt and at the 3′ terminus of 3-nt to 7-nt respectively. Each contains a sense strand having a C22 lipid conjugate positioned 12-nt from the 3′ terminus and a single LNA at the 5′ terminus.
[1300] (iv) Compounds 75-79 as shown in FIG. 11A contain a sense strand having a 2-nt truncation at the 3′ terminus and a truncation at the 5′ terminus of 1-5 nucleotides respectively, yielding an antisense strand having an overhang at the 5′ terminus of 2-nt and at the 3′ terminus of 3-nt to 7-nt respectively. Each contains a sense strand having a C22 lipid conjugate positioned 12-nt from the 3′ terminus, and two LNAs (one positioned at the 5′ terminus and one positioned 3-nt from the 3′ terminus).
[1301] (v) Compounds 80-84 as shown in FIG. 11B contain a sense strand having a 2-nt truncation at the 3′ terminus and a truncation at the 5′ terminus of 1-5 nucleotides respectively, yielding an antisense strand having an overhang at the 5′ terminus of 2-nt and at the 3′ terminus of 3-nt to 7-nt respectively. Each contains a sense strand having a C22 lipid conjugate positioned 12-nt from the 3′ terminus, and three LNAs (one positioned at the 5′ terminus, one positioned 3-nt from the 3′ terminus, and one positioned 4-nt from the 3′ terminus).
[1302] (vi) Compounds 85-89 as shown in FIG. 11B contain a sense strand having a 3-nt truncation at the 3′ terminus and a truncation at the 5′ terminus of 1-5 nucleotides respectively, yielding an antisense strand having an overhang at the 5′ terminus of 3-nt and at the 3′ terminus of 3-nt to 7-nt respectively. Each contains a sense strand having a C22 lipid conjugate positioned 11-nt from the 3′ terminus, and three LNAs (one positioned at the 5′ terminus, one positioned 2-nt from the 3′ terminus, and one positioned 3-nt from the 3′ terminus). An additional PS backbone linkage was installed such that two PS linkages were present at the 3′ terminus of the sense strand.
[1303] (vi) Compounds 90-94 as shown in FIG. 11B contain a sense strand having a 4-nt truncation at the 3′ terminus and a truncation at the 5′ terminus of 1-5 nucleotides respectively, yielding an antisense strand having an overhang at the 5′ terminus of 4-nt and at the 3′ terminus of 3-nt to 7-nt respectively. Each contains a sense strand having a C22 lipid conjugate positioned 10-nt from the 3′ terminus, and three LNAs (one positioned at the 5′ terminus, one positioned at the 3′ terminus, and one positioned 2-nt from the 3′ terminus). An additional PS backbone linkage was installed such that two PS linkages were present at the 3′ terminus of the sense strand.
[1304] (vii) Compounds 95-97 as shown in FIG. 11B contain a sense strand having a 4-nt truncation at the 3′ terminus and a truncation at the 5′ terminus of 6-nt to 8-nt respectively, yielding an antisense strand having an overhang at the 5′ terminus of 4-nt and at the 3′ terminus of 8-nt to 10-nt respectively. Each contains a sense strand having a C22 lipid conjugate positioned 7-nt from the 3′ terminus, and three LNAs (one positioned at the 5′ terminus, one positioned at the 3′ terminus, and one positioned 2-nt from the 3′ terminus). An additional PS backbone linkage was installed such that two PS linkages were present at the 3′ terminus of the sense strand.

[1305] To evaluate the RNAi oligonucleotide-lipid conjugates, CD-1 female mice (having a weight of 18-20 g) were given a single subcutaneous (s.c.) injection of 15 mg/kg oligonucleotide-lipid conjugate formulated in PBS. The RNAi oligonucleotide-lipid conjugates administered for each of the treatment groups are outlined in Table 9. Group A were control mice that received PBS only.

TABLE 9
Lipid-conjugated RNAi oligonucleotides
administered to animal groups A-AO

| | | Sense | | Antisense | |
|---|---|---|---|---|---|
| Group | Compound | SEQ ID NOS | | SEQ ID NOs | |
| # | ID | Unmod | Mod | Unmod | Mod |
| A | — | — | — | — | — |
| B | 58 | 13 | 103 | 58 | 148 |
| C | 59 | 14 | 104 | 59 | 149 |
| D | 60 | 15 | 105 | 60 | 150 |
| E | 61 | 16 | 106 | 61 | 151 |
| F | 62 | 17 | 107 | 62 | 152 |
| G | 63 | 18 | 108 | 63 | 153 |
| H | 64 | 19 | 109 | 64 | 154 |
| I | 65 | 20 | 110 | 65 | 155 |
| J | 66 | 21 | 111 | 66 | 156 |
| K | 67 | 22 | 112 | 67 | 157 |
| L | 68 | 23 | 113 | 68 | 158 |
| M | 69 | 24 | 114 | 69 | 159 |
| N | 70 | 25 | 115 | 70 | 160 |
| O | 71 | 26 | 116 | 71 | 161 |
| P | 72 | 27 | 117 | 72 | 162 |
| Q | 73 | 28 | 118 | 73 | 163 |
| R | 74 | 29 | 119 | 74 | 164 |
| S | 75 | 30 | 120 | 75 | 165 |
| T | 76 | 31 | 121 | 76 | 166 |
| U | 77 | 32 | 122 | 77 | 167 |
| V | 78 | 33 | 123 | 78 | 168 |
| W | 79 | 34 | 124 | 79 | 169 |
| X | 80 | 35 | 125 | 80 | 170 |
| Y | 81 | 36 | 126 | 81 | 171 |
| Z | 82 | 37 | 127 | 82 | 172 |
| AA | 83 | 38 | 128 | 83 | 173 |
| AB | 84 | 39 | 129 | 84 | 174 |
| AC | 85 | 40 | 130 | 85 | 175 |
| AD | 86 | 41 | 131 | 86 | 176 |
| AE | 87 | 42 | 132 | 87 | 177 |
| AF | 88 | 43 | 133 | 88 | 178 |
| AG | 89 | 44 | 134 | 89 | 179 |
| AH | 90 | 45 | 135 | 90 | 180 |
| AI | 91 | 46 | 136 | 91 | 181 |
| AJ | 92 | 47 | 137 | 92 | 182 |
| AK | 93 | 48 | 138 | 93 | 183 |
| AL | 94 | 49 | 139 | 94 | 184 |
| AM | 95 | 50 | 140 | 95 | 185 |
| AN | 96 | 51 | 141 | 96 | 186 |
| AO | 97 | 52 | 142 | 97 | 187 |

[1306] Target knockdown was assessed 7 days post-injection. RNA was extracted from liver tissue and murine CD68 mRNA levels were determined by qPCR (normalized to endogenous housekeeping gene Ppib). The qPCR was performed using PrimeTime™ qPCR Probe Assays. The percentage of murine CD68 mRNA remaining in the samples from treated mice was determined using the 2-ΔΔCt (“delta-delta Ct”) method (Livak and Schmittgen (2001) METHODS 25:402-408). Percent CD68 mRNA expression in the liver as measured for each treatment group is shown in FIG. 12. Silencing of CD68 mRNA expression was observed for most treatment groups. Overall, truncations at the 5′ terminus of the sense strand were well-tolerated. All molecules in this Example comprising a 2-nt or 3-nt overhang at the 5′ end of the antisense strand reduced CD68 mRNA expression. Compounds 90-94 comprising a 4-nt overhang at the 5′ end of the antisense strand reduced expression of CD68 mRNA expression.

### Example 10: RNAi Oligonucleotide-lipid Conjugates Targeting the Liver

[1307] RNAi oligonucleotide-lipid conjugates were evaluated to determine the effect of inclusion of LNAs and positioning of a lipid conjugate on specific targeting of activity in liver tissue. Each oligonucleotide-lipid conjugate tested comprised an antisense strand having a region of complementarity to mRNA encoding Aldh2, which is a protein expressed in liver and other tissues.

[1308] Oligonucleotide-lipid conjugates that were evaluated included those having the structures of Compounds 109-117 as shown in FIG. 13. Each of the compounds contain a sense strand having a blunt end at the 3′ terminus, a truncation at the 5′ terminus resulting in an antisense strand having a 6-nt overhang at the 3′ terminus, a C16 lipid conjugate, and at least one LNA. The positioning of the C16 lipid conjugate and the number of LNAs varied per compound as further described below:
[1309] (i) Compounds 109-111 contain a C16 lipid conjugate positioned at the 3′ terminus of the sense strand and an LNA positioned at the 5′ terminus of the sense strand. Compound 110 contains an LNA at position 11 of the sense strand. Compound 111 contains an LNA at positions 11 and 12 of the sense strand.
[1310] (ii) Compounds 112-114 contain a C16 lipid conjugate positioned at the 5′ terminus of the sense strand and an LNA at position 2 of the sense strand. Compound 113 contains an LNA at position 11 of the sense strand. Compound 114 contains an LNA at positions 11 and 12 of the sense strand.
[1311] (iii) Compounds 115-117 contain a C16 lipid conjugate at position 5 of the sense strand and an LNA at the 5′ terminus of the sense strand. Compound 116 contains an LNA at position 11 of the sense strand. Compound 117 contains an LNA at positions 11 and 12 of the sense strand.

[1312] To evaluate the RNAi oligonucleotide-lipid conjugates, mice were given a single subcutaneous (s.c.) injection of 10 mg/kg oligonucleotide-lipid conjugate formulated in PBS. The RNAi oligonucleotide-lipid conjugate administered to each animal group is outlined in Table 10. Group A were control mice that received PBS only.

TABLE 10
Lipid-conjugated RNAi oligonucleotides
administered to animal groups A-J

| | | Sense | | Antisense | |
|---|---|---|---|---|---|
| Group | Compound | SEQ ID NOS | | SEQ ID NOS | |
| # | ID | Unmod | Mod | Unmod | Mod |
| A | — | — | — | — | — |
| B | 109 | 241 | 260 | 250 | 269 |
| C | 110 | 242 | 261 | 251 | 270 |
| D | 111 | 243 | 262 | 252 | 271 |
| E | 112 | 244 | 263 | 253 | 272 |
| F | 113 | 245 | 264 | 254 | 273 |
| G | 114 | 246 | 265 | 255 | 274 |
| H | 115 | 247 | 266 | 256 | 275 |
| I | 116 | 248 | 267 | 257 | 276 |
| J | 117 | 249 | 268 | 258 | 277 |

[1313] Target knockdown was assessed 7 days post-injection. RNA was extracted from various tissues and murine ALDH2 mRNA levels were determined by qPCR (normalized to endogenous housekeeping gene Ppib). The qPCR was performed using PrimeTime™ qPCR Probe Assays, which consisted of a primer pair and fluorescently labeled 5′ nuclease probe specific to murine ALDH2 mRNA. The percentage of murine ALDH2 mRNA remaining in the samples from treated mice was determined using the 2-ΔΔCt (“delta-delta Ct”) method (Livak and Schmittgen (2001) METHODS 25:402-408).

[1314] Percent ALDH2 mRNA expression in the liver, skeletal muscle, adipose, and adrenal as measured for each treatment group is respectively shown in FIGS. 14A-14D. Silencing of ALDH2 mRNA expression was observed in all tissues evaluated for most treatment groups.

### Example 11: RNAi Oligonucleotide-Lipid Conjugates Having a Double Overhang Produce Silencing of mRNA Encoding a Liver Target

[1315] It was evaluated if an RNAi oligonucleotide-lipid conjugate having an overhang at both the 5′ terminus and 3′ terminus of the antisense strand would provide similar silencing activity against a liver target as a conjugate having a blunt end. Silencing of mRNA expression of four liver targets was evaluated, including STAT3, SLC25A1, HMGB1, and ALDH2.

[1316] The RNAi oligonucleotide-lipid conjugates evaluated had the structures of Compounds 123-126 as shown in FIG. 15. Compounds 123-126 have an antisense strand respectively having a region of complementarity to mRNA encoding STAT3, SLC25A1, HMGB1, and ALDH2, a 2-nt overhang at the 3′ terminus, and a blunt end at the 5′ terminus. Compounds 127-130 have an antisense strand respectively having a region of complementarity to mRNA encoding STAT3, SLC25A1, HMGB1, and ALDH2 and a 2-nt overhang at both the 5′ terminus and 3′ terminus.

[1317] To evaluate the RNAi oligonucleotide-lipid conjugates, mice were given a single subcutaneous (s.c.) injection of 15 mg/kg oligonucleotide-lipid conjugate formulated in PBS. The RNAi oligonucleotide-lipid conjugates administered for each of the animal groups are outlined in Table 11. Group A were control mice that received PBS only.

TABLE 11
Lipid-conjugated RNAi oligonucleotides directed
to mRNA targets expressed in the liver

| | | | Sense SEQ ID | | Antisense SEQ | |
|---|---|---|---|---|---|---|
| Group | Compound | mRNA | NOs | | ID NOs | |
| # | ID | target | Unmod | Mod | Unmod | Mod |
| A | — | — | — | — | — | — |
| B1 | 123 | STAT3 | 278 | 294 | 286 | 302 |
| B2 | 124 | SLC25A1 | 279 | 295 | 287 | 303 |
| B3 | 125 | HMGB1 | 280 | 296 | 288 | 304 |
| B4 | 126 | ALDH2 | 281 | 297 | 289 | 305 |
| C1 | 127 | STAT3 | 282 | 298 | 290 | 306 |
| C2 | 128 | SLC25A1 | 283 | 299 | 291 | 307 |
| C3 | 129 | HMGB1 | 284 | 300 | 292 | 308 |
| C4 | 130 | ALDH2 | 285 | 301 | 293 | 309 |

[1318] Target knockdown was assessed 14 days post-injection. RNA was extracted from liver tissue and murine STAT3, SLC25A1, HMGB1, and ALDH2 mRNA levels were determined by qPCR (normalized to endogenous housekeeping gene Ppib). The qPCR was performed using PrimeTime™ qPCR Probe Assays. The percentage of target mRNA remaining in the samples from treated mice was determined using the 2-ΔΔCt (“delta-delta Ct”) method (Livak and Schmittgen (2001) METHODS 25:402-408).

[1319] As shown in FIGS. 16A-16B, similar levels of reduction of mRNA encoding STAT3 (FIG. 16A), SLC25A1 (FIG. 16B), HMGB1 (FIG. 16C), and ALDH2 (FIG. 16D) was observed for oligonucleotide-lipid conjugate having a blunt-end at the 5′ terminus of the antisense strand or having a double overhang at the 5′ and 3′ termini of the antisense strand.

### Example 12: Tetraloop Passenger Truncations with and without Phosphorothioate Linkage on Exposed Guide for Inhibition of a Neuronal Target Gene in the CNS

[1320] RNAi oligonucleotide-lipid conjugates were evaluated to determine the effect of passenger strand truncations with and without phosphorothioate linkages on the exposed guide strand in neurons in oligonucleotides having a tetraloop. Each oligonucleotide-lipid conjugate tested comprised an antisense strand having a region of complementarity to mRNA encoding TUBB3.

[1321] Oligonucleotide-lipid conjugates that were evaluated included those having the structures of Compounds 131-136 as shown in FIG. 17, compared to the parent oligonucleotide-lipid conjugate evaluated in previous studies (Compound 1, described above). Each of Compounds 131-136 contain a sense strand having a tetraloop at the 3′ terminus and a C16 lipid conjugated on the second nucleotide of the tetraloop. The compounds comprise different passenger strand lengths and phosphorothioate linkages on each compound as further described below:
[1322] (i) Compound 131 comprises a 32-nucleotide sense strand with a 4-nt truncation (i.e. a 6-nt antisense strand overhang at the 3′ terminus) and comprises phosphorothioate linkages between positions 1 and 2 of the sense strand and between positions 1 and 2, 2 and 3, 3 and 4, 20 and 21, and 21 and 22 of the antisense strand.
[1323] (ii) Compound 132 comprises a 30-nucleotide sense strand with a 6-nt truncation (i.e. an 8-nt antisense strand overhang at the 3′ terminus) and comprises phosphorothioate linkages between positions 1 and 2 of the sense strand and between positions 1 and 2, 2 and 3, 3 and 4, 13 and 14, 14 and 15, 20 and 21, and 21 and 22 of the antisense strand. Additionally, the sense strand comprises an LNA at position 1.
[1324] (iii) Compound 133 comprises a 28-nucleotide sense strand with an 8-nt truncation (i.e. a 10-nt antisense strand overhang at the 3′ terminus) and comprises phosphorothioate linkages between positions 1 and 2 of the sense strand and between positions 1 and 2, 2 and 3, 3 and 4, 13 and 14, 14 and 15, 20 and 21, and 21 and 22 of the antisense strand. Additionally, the sense strand comprises an LNA at position 1.
[1325] (iii) Compound 134 comprises a 32-nucleotide sense strand with a 4-nt truncation (i.e. a 6-nt antisense strand overhang at the 3′ terminus) and comprises phosphorothioate linkages between positions 1 and 2 of the sense strand and between positions 1 and 2, 2 and 3, 3 and 4, 16 and 17, 17 and 18, 18 and 19, 19 and 20, 20 and 21, and 21 and 22 of the antisense strand.
[1326] (iv) Compound 135 comprises a 30-nucleotide sense strand with a 6-nt truncation (i.e. an 8-nt antisense strand overhang at the 3′ terminus) and comprises phosphorothioate linkages between positions 1 and 2 of the sense strand and between positions 1 and 2, 2 and 3, 3 and 4, 13 and 14, 14 and 15, 15 and 16, 16 and 17, 17 and 18, 18 and 19, 19 and 20, 20 and 21, and 21 and 22 of the antisense strand. Additionally, the sense strand comprises an LNA at position 1.
[1327] (v) Compound 136 comprises a 28-nucleotide sense strand with an 8-nt truncation (i.e. a 10-nt antisense strand overhang at the 3′ terminus) and comprises phosphorothioate linkages between positions 1 and 2 of the sense strand and between positions 1 and 2, 2 and 3, 3 and 4, 12 and 13, 13 and 14, 14 and 15, 15 and 16, 16 and 17, 17 and 18, 18 and 19, 19 and 20, 20 and 21, and 21 and 22 of the antisense strand. Additionally, the sense strand comprises an LNA at position 1.

[1328] To evaluate the RNAi oligonucleotide-lipid conjugates, 6 to 10 week old C57BL6 female mice were given a single intrathecal (i.t.) injection of 500 μg oligonucleotide-lipid conjugate formulated in artificial cerebrospinal fluid (aCSF). The RNAi oligonucleotide-lipid conjugate administered to each animal group is outlined in Table 12. Group A were control mice that received artificial cerebrospinal fluid (aCSF) only.

TABLE 12
Lipid-conjugated RNAi oligonucleotides
administered to animal groups A-H

| | | Sense | | Antisense | |
|---|---|---|---|---|---|
| Group | Compound | SEQ ID NOS | | SEQ ID NOs | |
| # | ID | Unmod | Mod | Unmod | Mod |
| A | aCSF | — | — | — | — |
| B | 1 | 310 | 338 | 324 | 352 |
| C | 131 | 527 | 530 | 324 | 352 |
| D | 132 | 528 | 531 | 324 | 533 |
| E | 133 | 529 | 532 | 324 | 533 |
| F | 134 | 527 | 530 | 324 | 534 |
| G | 135 | 528 | 531 | 324 | 535 |
| H | 136 | 529 | 532 | 324 | 536 |

[1329] Target knockdown was assessed 28 days post-injection. RNA was extracted from various tissues and murine TUBB3 mRNA levels were determined as described in Example 2.

[1330] Percent TUBB3 mRNA expression in the frontal cortex, hippocampus, cerebellum, lumbar dorsal root ganglion, medulla, and lumbar spinal cord as measured for each treatment group is respectively shown in FIGS. 18A-18F. Silencing of TUBB3 mRNA expression was observed in cerebellum, lumbar DRG, medulla, and lumbar spinal cord. Particularly, Compound 136 (comprising a P-8 truncation, i.e., a 10-nt antisense overhang, with phosphorothioate linkages on the exposed antisense strand) demonstrated increased inhibition in the lumbar DRG with restricted inhibition beyond the medulla demonstrating a platform for inhibiting target gene knockdown in the lumbar DRG.

### Example 13: 5′ Truncations with Locked Nucleic Acids on the Sense Strand for Inhibition of a Neuronal Target Gene in the CNS

[1331] RNAi oligonucleotide-lipid conjugates were evaluated to determine the effect of blunt-end passenger truncations with locked nucleic acids on the guide strand in neurons. Each oligonucleotide-lipid conjugate tested comprised an antisense strand having a region of complementarity to mRNA encoding TUBB3.

[1332] Oligonucleotide-lipid conjugates that were evaluated included those having the structures of Compounds 138-145 as shown in FIG. 19, compared to the parent oligonucleotide-lipid conjugate evaluated in previous studies (Compound 1, described above) and Compound 137. Compound 137 contains a blunt-end at the 3′ terminus of the sense strand, a 2-nt overhang at the 3′ terminus of the antisense strand, and a C16 lipid conjugated to the 5′ terminal nucleotide of the sense strand. Each of Compounds 138-145 contain a blunt-end at the 3′ terminus of the sense strand, a C16 lipid conjugated at the 5′ terminal of the sense strand (position 1), and phosphorothioate linkages between positions: 1 and 2, 18 and 19, 19 and 20, of the sense strand; 1 and 2, 2 and 3, 3 and 4, 20 and 21, 21 and 22, of the antisense strand. Compounds 141-145 comprise a truncation at the 5′ terminus of the sense strand resulting in 6-nt truncation (i.e. an 8-nt antisense strand overhang at the 3′ terminus). Additionally, Compounds 141-145 comprise two phosphorothioate linkages flanking the nucleotide at position 14 (from 5′ to 3′) of the antisense strand (i.e., phosphorothioate linkages between positions 13 and 14, and 14 and 15, of the antisense strand). The compounds comprise different positions of locked nucleic acids as further described below:
[1333] (i) Compound 141 contains no locked nucleic acids (LNAs).
[1334] (ii) Compounds 138 and 142 contain an LNA at position 2 of the sense strand.
[1335] (iii) Compound 139 contains an LNA at positions 2 and 15.
[1336] (iv) Compound 140 contains an LNA at positions 2, 15, and 16.
[1337] (v) Compound 143 contains an LNA at positions 2 and 9.
[1338] (vi) Compounds 144 contains an LNA at positions 2, 9, and 10.
[1339] (vii) Compound 145 contains an LNA at positions 2, 9, 10, 12, and 13.

[1340] To evaluate the RNAi oligonucleotide-lipid conjugates, mice were given a single intrathecal (i.t.) injection of 500 μg oligonucleotide-lipid conjugate formulated in artificial cerebrospinal fluid (aCSF). The RNAi oligonucleotide-lipid conjugate administered to each animal group is outlined in Table 13. Group A were control mice that received artificial cerebrospinal fluid (aCSF) only.

TABLE 13
Lipid-conjugated RNAi oligonucleotides
administered to animal groups A-K

| | | Sense | | Antisense | |
|---|---|---|---|---|---|
| Group | Compound | SEQ ID NOS | | SEQ ID NOS | |
| # | ID | Unmod | Mod | Unmod | Mod |
| A | aCSF | | | | |
| B | 1 | 310 | 338 | 324 | 352 |
| C | 137 | 372 | 386 | 324 | 352 |
| D | 138 | 372 | 539 | 324 | 352 |
| E | 139 | 372 | 540 | 324 | 352 |
| F | 140 | 372 | 541 | 324 | 352 |
| G | 141 | 537 | 542 | 324 | 533 |
| H | 142 | 537 | 543 | 324 | 533 |
| I | 143 | 537 | 544 | 324 | 533 |
| J | 144 | 537 | 545 | 324 | 533 |
| K | 145 | 538 | 546 | 324 | 533 |

[1341] Target knockdown was assessed 28 days post-injection. RNA was extracted from various tissues and murine TUBB3 mRNA levels were determined as described in Example 2.

[1342] Percent TUBB3 mRNA expression in the frontal cortex, hippocampus, cerebellum, medulla, lumbar dorsal root ganglion, and lumbar spinal cord as measured for each treatment group is respectively shown in FIGS. 20A-20F. Silencing of TUBB3 mRNA expression was observed in all tissues evaluated. Inclusion of at least one LNA with a P-6 sense strand truncation enhanced knockdown efficiency in most of the tissues evaluated (e.g., Compound 142) and inclusion of 2 LNAs enhanced knockdown further.

### Example 14: 5′ C16 Lipid Conjugated Blunt-End Oligonucleotides with Sense Strand Locked Nucleic Acids for Inhibition of a Neuronal Target Gene in the CNS

[1343] RNAi oligonucleotide-lipid conjugates were evaluated to determine the effect of blunt-end oligonucleotides with locked nucleic acids on the guide strand in neurons. Each oligonucleotide-lipid conjugate tested comprised an antisense strand having a region of complementarity to mRNA encoding TUBB3.

[1344] Oligonucleotide-lipid conjugates that were evaluated included those having the structures of Compounds 138-140, and 146-148 as shown in FIG. 21, compared to the parent oligonucleotide-lipid conjugate evaluated in previous studies (Compounds 1 and 137, described above). Each of Compounds 138-140 and 147-148 contain a blunt-end at the 3′ terminus of the sense strand and a C16 lipid conjugated at the 5′ terminal nucleotide of the sense strand. Compound 146 contains a blunt-end at the 3′ terminus of the sense strand and no lipid conjugated at the 5′ terminus of the sense strand. Each of Compounds 138-140 and 147-148 comprise phosphorothioate linkages between positions: 1 and 2, 18 and 19, and 19 and 20, of the sense strand; 1 and 2, 2 and 3, 3 and 4, 20 and 21, and 21 and 22, of the antisense strand. The compounds comprise different positions of locked nucleic acids as further described below:
[1345] (i) Compounds 137, and 146 contain no locked nucleic acids.
[1346] (ii) Compound 138 contains an LNA at position 2 of the sense strand.
[1347] (iii) Compound 139 contains an LNA at positions 2 and 15.
[1348] (iv) Compound 140 contains an LNA at positions 2, 15, and 16.
[1349] (v) Compound 145 contains an LNA at positions 2, 15, 16, and 18.
[1350] (vi) Compound 148 contains an LNA at positions 2, 15, 16, 18, and 19.

[1351] To evaluate the RNAi oligonucleotide-lipid conjugates, 6 to 10 week old C57BL6 mice were given a single intrathecal (i.t.) injection of 500 μg oligonucleotide-lipid conjugate formulated in artificial cerebrospinal fluid (aCSF). The RNAi oligonucleotide-lipid conjugate administered to each animal group is outlined in Table 14. Group A were control mice that received artificial cerebrospinal fluid (aCSF) only.

TABLE 14
Lipid-conjugated RNAi oligonucleotides
administered to animal groups A-I

| Group | Compound | Sense SEQ ID NOS | | Antisense SEQ ID NOs | |
|---|---|---|---|---|---|
| # | ID | Unmod | Mod | Unmod | Mod |
| A | aCSF | | | | |
| B | 1 | 310 | 338 | 324 | 352 |
| C | 137 | 372 | 386 | 324 | 352 |
| D | 146 | 372 | 547 | 324 | 352 |
| E | 138 | 372 | 539 | 324 | 352 |
| F | 139 | 372 | 540 | 324 | 352 |
| G | 140 | 372 | 541 | 324 | 352 |
| H | 147 | 439 | 548 | 324 | 352 |
| I | 148 | 439 | 461 | 324 | 352 |

[1352] Target knockdown was assessed 28 days post-injection. RNA was extracted from various tissues and murine TUBB3 mRNA levels were determined as described in Example 2.

[1353] Percent TUBB3 mRNA expression in the frontal cortex, hippocampus, medulla, lumbar dorsal root ganglion, cerebellum, and lumbar spinal cord as measured for each treatment group is respectively shown in FIGS. 22A-22F. Silencing of TUBB3 mRNA expression was observed in all tissues evaluated for most treatment groups. Conjugation of a lipid (i.e., C16) on the 5′ end of the sense strand enhanced neuronal knockdown (see e.g., Compound 146 compared to Compounds E-I). Additionally, inclusion of at least 1 LNA increased knockdown activity of oligonucleotides in deeper (e.g., frontal cortex and hippocampus) tissue compared to compounds without an LNA, with inclusion of 2 to 4 LNAs further increasing knockdown activity.

### Example 15: 5′C16 Lipid Conjugated P-4 Truncated Sense Strand with Locked Nucleic Acids for Inhibition a Neuronal Target Gene in the CNS

[1354] RNAi oligonucleotide-lipid conjugates were evaluated to determine the effect of blunt-end passenger truncations with locked nucleic acids on the guide strand in neurons. Each oligonucleotide-lipid conjugate tested comprised an antisense strand having a region of complementarity to mRNA encoding TUBB3.

[1355] Oligonucleotide-lipid conjugates that were evaluated included those having the structures of Compounds 149-154 as shown in FIG. 23, compared to the parent oligonucleotide-lipid conjugate evaluated in previous studies (Compounds 1 and 137, described above). Each of Compounds 149-154 contain a blunt-end at the 3′ terminus of the sense strand, and a truncation at the 5′ terminus of the sense strand resulting in a 4-nt truncation (i.e., a 6-nt overhang of the antisense strand at the 3′ terminus), and a C16 lipid conjugate a the 5′ terminal of the sense strand. Each of compounds 149-154 comprise phosphorothioate linkages between positions: 1 and 2, 14 and 15, and 15 and 16, of the sense strand; 1 and 2, 2 and 3, 3 and 4, 20 and 21, and 21 and 22, of the antisense strand. The compounds comprise different positions of locked nucleic acids as further described below:
[1356] (i) Compounds 1, 137, and 149 contain no locked nucleic acids.
[1357] (ii) Compound 150 contains an LNA at position 2 of the sense strand.
[1358] (iii) Compound 151 contains an LNA at positions 2 and 11 of the sense strand.
[1359] (iv) Compound 152 contains an LNA at positions 2, 11, and 12 of the sense strand.
[1360] (v) Compound 153 contains an LNA at positions 2, 11, 12, and 14 of the sense strand.
[1361] (vi) Compound 154 contains an LNA at positions 2, 11, 12, 14, and 15 of the sense strand.

[1362] To evaluate the RNAi oligonucleotide-lipid conjugates, 6 to 10 week old C57BL6 female mice were given a single intrathecal (i.t.) injection of 500 μg oligonucleotide-lipid conjugate formulated in artificial cerebrospinal fluid (aCSF). The RNAi oligonucleotide-lipid conjugate administered to each animal group is outlined in Table 15. Group A were control mice that received artificial cerebrospinal fluid (aCSF) only.

TABLE 15
Lipid-conjugated RNAi oligonucleotides
administered to animal groups A-I

| Group | Compound | Sense SEQ ID NOS | | Antisense SEQ ID NOs | |
|---|---|---|---|---|---|
| # | ID | Unmod | Mod | Unmod | Mod |
| A | aCSF | | | | |
| B | 1 | 310 | 338 | 324 | 352 |
| C | 137 | 372 | 386 | 324 | 352 |
| D | 149 | 549 | 551 | 324 | 352 |
| E | 150 | 549 | 552 | 324 | 352 |
| F | 151 | 549 | 553 | 324 | 352 |
| G | 152 | 549 | 554 | 324 | 352 |
| H | 153 | 550 | 555 | 324 | 352 |
| I | 154 | 551 | 556 | 324 | 352 |

[1363] Target knockdown was assessed 28 days post-injection. RNA was extracted from various tissues and murine TUBB3 mRNA levels were determined as described in Example 2.

[1364] Percent TUBB3 mRNA expression in the frontal cortex, hippocampus, medulla, lumbar dorsal root ganglion, cerebellum, and lumbar spinal cord as measured for each treatment group is respectively shown in FIGS. 24A-24F. Silencing of TUBB3 mRNA expression was observed in deeper (e.g., frontal cortex and hippocampus) tissue in compounds comprising an LNA. Increased knockdown was observed with the addition of 2-3 LNAs.

### Example 16: 5′C16 Lipid Conjugated P-8 Truncated Sense Strand with Locked Nucleic Acids for Inhibition of a Neuronal Target Gene in the CNS

[1365] RNAi oligonucleotide-lipid conjugates were evaluated to determine the effect of blunt-end passenger truncations with locked nucleic acids on the guide strand in neurons. Each oligonucleotide-lipid conjugate tested comprised an antisense strand having a region of complementarity to mRNA encoding TUBB3.

[1366] Oligonucleotide-lipid conjugates that were evaluated included those having the structures of Compounds 155-160 as shown in FIG. 25, compared to the parent oligonucleotide-lipid conjugate evaluated in previous studies (Compounds 1 and 137, described above). Each of Compounds 155-160 contain a blunt-end at the 3′ terminus of the sense strand, and a truncation at the 5′ terminus of the sense strand resulting in an 8-nt truncation (i.e., a 10-nt overhang of the antisense strand at the 3′ terminus), and a C16 lipid conjugate a the 5′ terminal of the sense strand. Additionally, Compounds 155-160 comprises two phosphorothioate linkages flanking the nucleotide at position 14 (from 5′ to 3′) of the antisense strand (i.e., phosphorothioate linkages between positions 13 and 14, and 14 and 15, of the antisense strand). Each of Compounds 155-160 comprise phosphorothioate linkages between positions: 1 and 2, 10 and 11, and 11 and 12, of the sense strand; 1 and 2, 2 and 3, 3 and 4, 13 and 14, 14 and 15, 20 and 21, and 21 and 22, of the antisense strand. The compounds comprise different positions of locked nucleic acids as further described below:
[1367] (i) Compounds 1, 137, and 155 contain no locked nucleic acids.
[1368] (ii) Compound 156 contains an LNA at position 2 of the sense strand.
[1369] (iii) Compound 157 contains an LNA at positions 2 and 7 of the sense strand.
[1370] (iv) Compound 152 contains an LNA at positions 2, 7, and 8 of the sense strand.
[1371] (v) Compound 153 contains an LNA at positions 2, 7, 8, and 10 of the sense strand.
[1372] (vi) Compound 154 contains an LNA at positions 2, 7, 8, 10, and 11 of the sense strand.

[1373] To evaluate the RNAi oligonucleotide-lipid conjugates, 6 to 10 week old C57BL6 female mice were given a single intrathecal (i.t.) injection of 500 μg oligonucleotide-lipid conjugate formulated in artificial cerebrospinal fluid (aCSF). The RNAi oligonucleotide-lipid conjugate administered to each animal group is outlined in Table 16. Group A were control mice that received artificial cerebrospinal fluid (aCSF) only.

TABLE 16
Lipid-conjugated RNAi oligonucleotides
administered to animal groups A-I

| Group | Compound | Sense SEQ ID NOS | | Antisense SEQ ID NOs | |
|---|---|---|---|---|---|
| # | ID | Unmod | Mod | Unmod | Mod |
| A | aCSF | | | | |
| B | 1 | 310 | 338 | 324 | 352 |
| C | 137 | 372 | 386 | 324 | 352 |
| D | 155 | 557 | 559 | 324 | 533 |
| E | 156 | 557 | 560 | 324 | 533 |
| F | 157 | 557 | 561 | 324 | 533 |
| G | 158 | 557 | 562 | 324 | 533 |
| H | 159 | 558 | 563 | 324 | 533 |
| I | 160 | 558 | 564 | 324 | 533 |

[1374] Target knockdown was assessed 28 days post-injection. RNA was extracted from various tissues and murine TUBB3 mRNA levels were determined as described in Example 2.

[1375] Percent TUBB3 mRNA expression in the frontal cortex, hippocampus, medulla, lumbar dorsal root ganglion, cerebellum, and lumbar spinal cord as measured for each treatment group is respectively shown in FIGS. 26A-26F. Inclusion of at least one LNA was beneficial for neuronal knockdown in molecules with a P-8 truncation (compare Compound 155 to Compounds 156-160). Silencing of TUBB3 mRNA expression was observed in deeper (e.g., frontal cortex and hippocampus) tissue in compounds comprising an LNA. Increased knockdown was observed with the addition of 2-3 LNAs.

### Example 17: 5′ P-6 Truncations with Locked Nucleic Acids on the Sense Strand for Inhibition of an Oligodendrocyte Target Gene in the CNS

[1376] RNAi oligonucleotide-lipid conjugates were evaluated to determine the effect of blunt-end passenger truncations with locked nucleic acids on the exposed guide strand in oligodendrocytes. Each oligonucleotide-lipid conjugate tested comprised an antisense strand having a region of complementarity to mRNA encoding UGT8, which is a protein expressed in oligodendrocytes of the CNS.

[1377] Oligonucleotide-lipid conjugates that were evaluated included those having the structures of Compounds 163-171 as shown in FIG. 27, compared to the parent oligonucleotide-lipid conjugates of Compounds 161 (tetraloop oligonucleotide with C16 lipid conjugated at second nucleotide of tetraloop) and 162 (blunt-end oligonucleotide with C16 lipid conjugated at 5′ terminal nucleotide). Each of Compounds 166-170 contain a blunt-end at the 3′ terminus of the sense strand, a truncation at the 5′ terminus of the sense strand resulting in a 6-nt truncation (i.e. an 8-nt antisense strand overhang at the 3′ terminus), and a C16 lipid conjugate a the 5′ terminal of the sense strand. Each of Compounds 162-165 contain a blunt-end at the 3′ terminus of the sense strand, and a C16 lipid conjugate a the 5′ terminal of the sense strand. Compound 171 contains a blunt-end at the 3′ terminus of the sense strand and does not comprise a lipid conjugate a the 5′ terminal of the sense strand. Compounds 162-165 and 177 comprise phosphorothioate linkages between positions: 1 and 2, 18 and 19, and 19 and 20, of the sense strand; 1 and 2, 2 and 3, 3 and 4, 20 and 21, and 21 and 22, of the antisense strand. Compounds 166-170 comprise phosphorothioate linkages between positions: 1 and 2, 18 and 19, and 19 and 20, of the sense strand; 1 and 2, 2 and 3, 3 and 4, 13 and 14, 14 and 15, 20 and 21, and 21 and 22, of the antisense strand. The compounds comprise different positions of locked nucleic acids as further described below:
[1378] (i) Compounds 161, 162, 166, and 171 contain no locked nucleic acids.
[1379] (ii) Compounds 163 and 167 contain an LNA at position 2 of the sense strand.
[1380] (iii) Compound 164 contains LNAs at positions 2 and 15.
[1381] (iv) Compound 165 contains LNAs at positions 2, 15, and 16.
[1382] (v) Compound 168 contains LNAs at positions 2 and 9.
[1383] (vi) Compound 169 contains LNAs at positions 2, 9, and 10.
[1384] (vii) Compound 170 contains LNAs at positions 2, 9, 10, 12, and 13.

[1385] To evaluate the RNAi oligonucleotide-lipid conjugates, 6 to 10 week old C57BL6 female mice were given a single intrathecal (i.t.) injection of 500 μg oligonucleotide-lipid conjugate formulated in artificial cerebrospinal fluid (aCSF). The RNAi oligonucleotide-lipid conjugate administered to each animal group is outlined in Table 17. Group A were control mice that received artificial cerebrospinal fluid (aCSF) only.

TABLE 17
Lipid-conjugated RNAi oligonucleotides
administered to animal groups A-L

| Group | Compound | Sense SEQ ID NOS | | Antisense SEQ ID NOs | |
|---|---|---|---|---|---|
| # | ID | Unmod | Mod | Unmod | Mod |
| A | aCSF | | | | |
| B | 161 | 580 | 581 | 577 | 578 |
| C | 162 | 565 | 567 | 577 | 578 |
| D | 163 | 565 | 568 | 577 | 578 |
| E | 164 | 565 | 569 | 577 | 578 |
| F | 165 | 565 | 570 | 577 | 578 |
| G | 166 | 566 | 571 | 577 | 579 |
| H | 167 | 566 | 572 | 577 | 579 |
| I | 168 | 566 | 573 | 577 | 579 |
| J | 169 | 566 | 574 | 577 | 579 |
| K | 170 | 566 | 575 | 577 | 579 |
| L | 171 | 565 | 576 | 577 | 578 |

[1386] Target knockdown was assessed 28 days post-injection. RNA was extracted from CNS tissue and murine UGT8 mRNA levels were determined by qPCR (normalized to endogenous housekeeping gene Rpl23). The percentage of murine mRNA remaining in the samples from treated mice was determined using the 2-ΔΔCt (“delta-delta Ct”) method (Livak and Schmittgen (2001) METHODS 25:402-408).

[1387] Percent UGT8 mRNA expression in the frontal cortex, hippocampus, hypothalamus, cerebellum, medulla, and lumbar spinal cord as measured for each treatment group is respectively shown in FIGS. 28A-28F. Silencing of UGT8 mRNA expression was observed in all tissues evaluated for most treatment groups. Inclusion of a P-6 truncation decreased activity independent of the number of LNAs present. Lipid conjugation increased knockdown in deep (e.g., frontal cortex and hypothalamus) tissue (compare Compound 171 to Compounds 162-165).

### Example 18: 5′ P-6 Truncations with Locked Nucleic Acids on the Sense Strand for Inhibition in an Astrocyte Target Gene in the CNS

[1388] RNAi oligonucleotide-lipid conjugates were evaluated to determine the effect of blunt-end passenger truncations with locked nucleic acids on the exposed guide strand in neurons. Each oligonucleotide-lipid conjugate tested comprised an antisense strand having a region of complementarity to mRNA encoding GFAP, which is a protein expressed in astrocytes of the central nervous system (CNS).

[1389] Oligonucleotide-lipid conjugates that were evaluated included those having the structures of Compounds 174-182 as shown in FIG. 29, compared to the parent oligonucleotide-lipid conjugates of Compounds 172 (tetraloop oligonucleotide with C16 lipid conjugated at second nucleotide of tetraloop) and 173 (blunt-end oligonucleotide with C16 lipid conjugated at 5′ terminal nucleotide). Each of Compounds 177-181 contain a blunt-end at the 3′ terminus of the sense strand, a truncation at the 5′ terminus of the sense strand resulting in a 6-nt truncation (i.e. an 8-nt antisense strand overhang at the 3′ terminus), and a C16 lipid conjugate a the 5′ terminal of the sense strand. Each of Compounds 173-176 contain a blunt-end at the 3′ terminus of the sense strand, and a C16 lipid conjugate a the 5′ terminal of the sense strand. Compound 182 contains a blunt-end at the 3′ terminus of the sense strand and does not comprise a lipid conjugate a the 5′ terminal of the sense strand. Compounds 173-176 and 182 comprise phosphorothioate linkages between positions: 1 and 2, 18 and 19, and 19 and 20, of the sense strand; 1 and 2, 2 and 3, 3 and 4, 20 and 21, and 21 and 22, of the antisense strand. Compounds 177-181 comprise phosphorothioate linkages between positions: 1 and 2, 18 and 19, and 19 and 20, of the sense strand; 1 and 2, 2 and 3, 3 and 4, 13 and 14, 14 and 15, 20 and 21, and 21 and 22, of the antisense strand. The compounds comprise different positions of locked nucleic acids as further described below:
[1390] (i) Compounds 172, 173, 177, and 182 contain no locked nucleic acids.
[1391] (ii) Compounds 174 and 178 contain an LNA at position 2 of the sense strand.
[1392] (iii) Compound 175 contains LNAs at positions 2 and 15.
[1393] (iv) Compound 176 contains LNAs at positions 2, 15, and 16.
[1394] (v) Compound 179 contains LNAs at positions 2 and 9.
[1395] (vi) Compound 180 contains LNAs at positions 2, 9, and 10.
[1396] (vii) Compound 181 contains LNAs at positions 2, 9, 10, 12, and 13.

[1397] To evaluate the RNAi oligonucleotide-lipid conjugates, 6 to 10 week old C57BL6 mice were given a single intrathecal (i.t.) injection of 500 μg oligonucleotide-lipid conjugate formulated in artificial cerebrospinal fluid (aCSF). The RNAi oligonucleotide-lipid conjugate administered to each animal group is outlined in Table 18. Group A were control mice that received artificial cerebrospinal fluid (aCSF) only.

TABLE 18
Lipid-conjugated RNAi oligonucleotides
administered to animal groups A-L

| | | Sense | | Antisense | |
|---|---|---|---|---|---|
| Group | Compound | SEQ ID NOS | | SEQ ID NOs | |
| # | ID | Unmod | Mod | Unmod | Mod |
| A | aCSF | | | | |
| B | 172 | 582 | 585 | 596 | 597 |
| C | 173 | 583 | 586 | 596 | 597 |
| D | 174 | 583 | 587 | 596 | 597 |
| E | 175 | 583 | 588 | 596 | 597 |
| F | 176 | 583 | 589 | 596 | 597 |
| G | 177 | 584 | 590 | 596 | 598 |
| H | 178 | 584 | 591 | 596 | 598 |
| I | 179 | 584 | 592 | 596 | 598 |
| J | 180 | 620 | 593 | 596 | 598 |
| K | 181 | 620 | 594 | 596 | 598 |
| L | 182 | 583 | 595 | 596 | 597 |

[1398] Target knockdown was assessed 28 days post-injection. RNA was extracted from CNS tissue and murine GFAP mRNA levels were determined by qPCR (normalized to endogenous housekeeping gene Rpl23). The percentage of murine mRNA remaining in the samples from treated mice was determined using the 2-ΔΔCt (“delta-delta Ct”) method (Livak and Schmittgen (2001) METHODS 25:402-408).

[1399] Percent GFAP mRNA expression in the frontal cortex, hippocampus, cerebellum, medulla, lumbar dorsal root ganglion, hypothalamus, and lumbar spinal cord as measured for each treatment group is respectively shown in FIGS. 30A-30F. Silencing of GFAP mRNA expression was observed in all tissues evaluated for most treatment groups. Oligonucleotides comprising a P-6 truncation demonstrated equivalent knockdown to full length oligonucleotides regardless of the presences of LNAs.

[1400] Overall, the data in Examples 13, 16, and 17 demonstrate oligonucleotide chemistries for cell-type specific targeting. For example, full length blunt structures with a lipid conjugate can be used to have enhanced targeting in astrocytes and oligodendrocytes with some potency for neurons. If neurons and/or astrocytes but not oligodendrocytes are of interest to target, oligonucleotides comprising a P-6 truncation of a sense strand comprising at least one LNA can be used. Additionally, use of a full length blunt-end oligonucleotide can target oligodendrocytes and astrocytes, but may also target neurons. To target astrocytes over oligodendrocytes, a P-6 sense strand truncated oligonucleotide can be used. Furthermore, if targeting oligodendrocytes and astrocytes with the exclusion of neurons is of interest an oligonucleotide comprising a C16 lipid on a tetraloop can be used. Together, these examples describe specific oligonucleotide structures for targeting or excluding target of specific cell types in the CNS.

### Example 19: Truncated Oligonucleotide Positional Lipid Walk on the Sense Strand for Inhibition of a Neuronal Target Gene in the CNS

[1401] RNAi oligonucleotide-lipid conjugates were evaluated to determine the effect of lipid position on truncated blunt-end oligonucleotides. Each oligonucleotide-lipid conjugate tested comprised an antisense strand having a region of complementarity to mRNA encoding TUBB3.

[1402] Oligonucleotide-lipid conjugates that were evaluated included those having the structures of Compounds 183-197 as shown in FIGS. 31A-31D, compared to the parent oligonucleotide-lipid conjugates of Compounds 137, 149, and 141 (blunt-end oligonucleotides comprising a 2, 6, and 8 nucleotide antisense strand overhang, respectively, as described above). Each of Compounds 183-190 contain a blunt-end at the 3′ terminus of the sense strand, and a 2-nt antisense strand overhang at the 3′ terminus. Each of Compounds 191-194 contain a blunt-end at the 3′ terminus of the sense strand, and a 4-nt truncation at the 5′ terminus of the sense strand (i.e. a 6-nt antisense strand overhang at the 3′ terminus). Compounds 195 and 196 contain a blunt-end at the 3′ terminus of the sense strand, and a 6-nt truncation at the 5′ terminus of the sense strand (i.e. an 8-nt antisense strand overhang at the 3′ terminus). Compound 197 contains a blunt-end at the 3′ terminus of the sense strand, and a an 8-nt truncation at the 5′ terminus of the sense strand (i.e. a 10-nt antisense strand overhang at the 3′ terminus).

[1403] Compounds 183-190 comprise phosphorothioate linkages between positions: 1 and 2, 18 and 19, and 19 and 20, of the sense strand; 1 and 2, 2 and 3, 3 and 4, 20 and 21, and 21 and 22, of the antisense strand. Compounds 191-194 comprise phosphorothioate linkages between positions: 1 and 2, 14 and 15, and 15 and 16, of the sense strand; 1 and 2, 2 and 3, 3 and 4, 20 and 21, and 21 and 22, of the antisense strand. Compounds 195 and 196 comprise phosphorothioate linkages between positions: 1 and 2, 12 and 13, and 13 and 14, of the sense strand; 1 and 2, 2 and 3, 3 and 4, 13 and 14, 14 and 15, 20 and 21, and 21 and 22, of the antisense strand. Compound 197 comprises phosphorothioate linkages between positions: 1 and 2, 10 and 11, and 11 and 12, of the sense strand; 1 and 2, 2 and 3, 3 and 4, 13 and 14, 14 and 15, 20 and 21, and 21 and 22, of the antisense strand.

[1404] The compounds comprise a C16 lipid conjugated at a different position of the sense strand as further described below:
[1405] (i) Compounds 137, 149, 141, and 197 comprise a C16 lipid at position 1.
[1406] (ii) Compounds 183, 191, and 195 comprise a C16 lipid at position 2.
[1407] (iii) Compounds 184, 192, and 196 comprise a C16 lipid at position 3.
[1408] (iv) Compounds 185 and 193 comprise a C16 lipid at position 4.
[1409] (v) Compounds 186 and 194 comprise a C16 lipid at position 5.
[1410] (vi) Compound 187 comprises a C16 lipid at position 6.
[1411] (vii) Compound 188 comprises a C16 lipid at position 7.
[1412] (viii) Compound 189 comprises a C16 lipid at position 8.
[1413] (ix) Compound 190 comprises a C16 lipid at position 9.

[1414] To evaluate the RNAi oligonucleotide-lipid conjugates, 6 to 10 week old C57BL6 mice were given a single intrathecal (i.t.) injection of 500 μg oligonucleotide-lipid conjugate formulated in artificial cerebrospinal fluid (aCSF). The RNAi oligonucleotide-lipid conjugate administered to each animal group is outlined in Table 19. Group A were control mice that received artificial cerebrospinal fluid (aCSF) only.

TABLE 19
Lipid-conjugated RNAi oligonucleotides administered to animals

| Compound | Sense SEQ ID NOS | | Antisense SEQ ID NOs | |
|---|---|---|---|---|
| ID | Unmod | Mod | Unmod | Mod |
| aCSF | — | — | — | — |
| 137 | 372 | 386 | 324 | 352 |
| 183 | 372 | 599 | 324 | 352 |
| 184 | 372 | 600 | 324 | 352 |
| 185 | 372 | 601 | 324 | 352 |
| 186 | 372 | 602 | 324 | 352 |
| 187 | 372 | 603 | 324 | 352 |
| 188 | 372 | 604 | 324 | 352 |
| 189 | 372 | 605 | 324 | 352 |
| 190 | 372 | 606 | 324 | 352 |
| 149 | 549 | 551 | 324 | 352 |
| 191 | 549 | 607 | 324 | 352 |
| 192 | 549 | 608 | 324 | 352 |
| 193 | 549 | 608 | 324 | 352 |
| 194 | 549 | 610 | 324 | 352 |
| 141 | 537 | 542 | 324 | 533 |
| 195 | 537 | 611 | 324 | 533 |
| 196 | 537 | 612 | 324 | 533 |
| 197 | 557 | 613 | 324 | 533 |

[1415] Target knockdown was assessed 28 days post-injection. RNA was extracted from CNS tissue and murine TUBB3 mRNA levels were determined as described in Example 2.

[1416] Percent TUBB3 mRNA expression in the frontal cortex, hippocampus, medulla, lumbar dorsal root ganglion, cerebellum, and lumbar spinal cord as measured for each treatment group is respectively shown in FIGS. 32A-32F. Silencing of TUBB3 mRNA expression was observed in all tissues evaluated for several treatment groups. All structures comprising a 5′ terminal lipid (position 1) enhanced neuronal knockdown in each tissue of the CNS.

### Example 20: Truncated Sense Strand Oligonucleotides with 5′ and 3′ Overhangs for Inhibition of an Astrocyte Target Gene in the CNS

[1417] RNAi oligonucleotide-lipid conjugates were evaluated to determine the effect of the length of 5′ and/or 3′ truncations on the sense strand of an oligonucleotide. Each oligonucleotide-lipid conjugate tested comprised an antisense strand having a region of complementarity to mRNA encoding GFAP.

[1418] Oligonucleotide-lipid conjugates that were evaluated included those having the structures of Compounds 180, 201-205 and 207-215 as shown in FIGS. 33A-33C, compared to the parent oligonucleotide-lipid conjugates of Compounds 173, 176, and 200. Each of Compounds 173, 176, and 200 contain a blunt end at the 3′ terminus of the sense strand, and a 2-nt overhang at the 3′ terminus of the antisense strand. Compounds 201-205 comprise a sense strand 16 nucleotides in length. Compounds 180 and 207-210 comprise a sense strand 14 nucleotides in length. Compounds 211-215 comprise a sense strand 12 nucleotides in length.

[1419] Compounds 176, 180, 200-205, and 207-215 comprise locked nucleic acids on the sense strand at the nucleotides complementary to nucleotides 5 and 6 of the antisense strand. Compounds 176, 180, 200-205, and 207-215 comprise a locked nucleic acid on position 2 of the sense strand.

[1420] Compounds 173, 176, and 200 comprise phosphorothioate linkages between positions: 1 and 2, 18 and 19, and 19 and 20 of the sense strand; 1 and 2, 2 and 3, 3 and 4, 20 and 21, and 21 and 22, of the antisense strand. Compound 200 comprises additional phosphorothioate linkages between positions 13 and 14 and 14 and 15 of the antisense strand. Compounds 201-205 comprise phosphorothioate linkages between positions: 1 and 2, 14 and 15, and 15 and 16, of the sense strand; 1 and 2, 2 and 3, 3 and 4, 20 and 21, and 21 and 22, of the antisense strand. Compounds 180 and 207-210 comprise phosphorothioate linkages between positions: 1 and 2, 12 and 13, and 13 and 14, of the sense strand; 1 and 2, 2 and 3, 3 and 4, 13 and 14, 14 and 15, 20 and 21, and 21 and 22, of the antisense strand. Compounds 211-215 comprise phosphorothioate linkages between positions: 1 and 2, 10 and 11, and 11 and 12, of the sense strand; 1 and 2, 2 and 3, 3 and 4, 13 and 14, 14 and 15, 20 and 21, and 21 and 22, of the antisense strand.

[1421] Compounds 173, 176, 180, 200-205, and 207-215 comprise a C16 lipid conjugated to position 1 of the sense strand.

[1422] The compounds comprise different length 5′ and 3′ overhangs of the antisense strand as further described below:
[1423] (i) Compounds 173, 176, and 200 comprise a 2-nt antisense strand overhang at the 3′ terminus.
[1424] (ii) Compound 201 comprises a 6-nt antisense strand overhang at the 3′ terminus.
[1425] (iii) Compound 202 comprises a 5-nt antisense strand overhang at the 3′ terminus and a 1-nt antisense strand overhang at the 5′ terminus.
[1426] (iv) Compound 203 comprises a 4-nt antisense strand overhang at the 3′ terminus and a 2-nt antisense strand overhang at the 5′ terminus.
[1427] (v) Compound 204 comprises a 3-nt antisense strand overhang at the 3′ terminus and a 3-nt antisense strand overhang at the 5′ terminus.
[1428] (vi) Compound 205 comprises a 2-nt antisense strand overhang at the 3′ terminus and a 4-nt antisense strand overhang at the 5′ terminus.
[1429] (vii) Compound 180 comprises a 8-nt antisense strand overhang at the 3′ terminus.
[1430] (viii) Compound 207 comprises a 7-nt antisense strand overhang at the 3′ terminus and a 1-nt antisense strand overhang at the 5′ terminus.
[1431] (ix) Compound 208 comprises a 6-nt antisense strand overhang at the 3′ terminus and a 2-nt antisense strand overhang at the 5′ terminus.
[1432] (x) Compound 209 comprises a 5-nt antisense strand overhang at the 3′ terminus and a 3-nt antisense strand overhang at the 5′ terminus.
[1433] (xi) Compound 210 comprises a 4-nt antisense strand overhang at the 3′ terminus and a 4-nt antisense strand overhang at the 5′ terminus.
[1434] (xii) Compound 211 comprises a 10-nt antisense strand overhang.
[1435] (xiii) Compound 212 comprises a 9-nt antisense strand overhang at the 3′ terminus and a 1-nt antisense strand overhang at the 5′ terminus.
[1436] (xiv) Compound 213 comprises a 8-nt antisense strand overhang at the 3′ terminus and a 2-nt antisense strand overhang at the 5′ terminus.
[1437] (xv) Compound 214 comprises a 7-nt antisense strand overhang at the 3′ terminus and a 3-nt antisense strand overhang at the 5′ terminus.
[1438] (xvi) Compound 215 comprises a 6-nt antisense strand overhang at the 3′ terminus and a 4-nt antisense strand overhang at the 5′ terminus.

[1439] To evaluate the RNAi oligonucleotide-lipid conjugates, 6 to 10 week old C57BL6 mice were given a single intrathecal (i.t.) injection of 100 μg oligonucleotide-lipid conjugate formulated in artificial cerebrospinal fluid (aCSF). The RNAi oligonucleotide-lipid conjugate administered to each animal group is outlined in Table 20. Control mice received artificial cerebrospinal fluid (aCSF) only.

TABLE 20
GFAP RNAi oligonucleotides administered to animals

| | | Sense | | Antisense | |
|---|---|---|---|---|---|
| | Compound | SEQ ID NOS | | SEQ ID NOS | |
| Group | ID | Unmod | Mod | Unmod | Mod |

Controls

| | | | | | |
|---|---|---|---|---|---|
| | aCSF | — | — | — | — |
| 5′C16 Blunt | 173 | 583 | 586 | 596 | 597 |
| 5′C16 Blunt + | 176 | 583 | 589 | 596 | 597 |
| LNA | | | | | |
| 5′C16 Blunt + | 200 | 614 | 589 | 596 | 598 |
| LNA + g14 2′F | | | | | |
| PS | | | | | |

16mer Sense Strands

| | | | | | |
|---|---|---|---|---|---|
| 16mer, g1 | 201 | 615 | 672 | 596 | 598 |
| 16mer, g2 | 202 | 616 | 673 | 596 | 598 |
| 16mer, g3 | 203 | 617 | 674 | 596 | 598 |
| 16mer, g4 | 204 | 618 | 675 | 596 | 598 |
| 16mer, g5 | 205 | 619 | 676 | 596 | 598 |

14mer Sense Strands

| | | | | | |
|---|---|---|---|---|---|
| 14mer, g1 | 180 | 620 | 593 | 596 | 598 |
| 14mer, g2 | 207 | 621 | 677 | 596 | 598 |
| 14mer, g3 | 208 | 622 | 678 | 596 | 598 |
| 14mer, g4 | 209 | 623 | 679 | 596 | 598 |
| 14mer, g5 | 210 | 624 | 680 | 596 | 598 |

12mer Sense Stands

| | | | | | |
|---|---|---|---|---|---|
| 12mer, g1 | 211 | 625 | 681 | 596 | 598 |
| 12mer, g2 | 212 | 626 | 682 | 596 | 598 |
| 12mer, g3 | 213 | 627 | 683 | 596 | 598 |
| 12mer, g4 | 214 | 628 | 684 | 596 | 598 |
| 12mer, g5 | 215 | 629 | 685 | 596 | 598 |

[1440] Target knockdown was assessed 28 days post-injection. RNA was extracted from CNS tissue and murine GFAP mRNA levels were determined as described in Example 17.

[1441] Percent GFAP mRNA expression in the frontal cortex, hippocampus, medulla, and lumbar spinal cord as measured for each treatment group is respectively shown in FIGS. 34A-34D. Silencing of GFAP mRNA expression was observed in all tissues evaluated for most treatment groups. Silencing of GFAP mRNA expression was observed in the lumbar spinal cord and medulla following treatment with all RNAi oligonucleotide-lipid conjugates tested. These results demonstrate the ability of RNAi oligonucleotide-lipid conjugates having truncated sense strands to inhibit astrocyte gene targets in various regions and tissues of the CNS.

### Example 21: Truncated Sense Strand Oligonucleotides with 5′ and 3′ Overhangs for Inhibition of a Neuronal Target Gene in the CNS

[1442] RNAi oligonucleotide-lipid conjugates were evaluated to determine the effect of the length of 5′ and/or 3′ truncations on the sense strand of an oligonucleotide. Each oligonucleotide-lipid conjugate tested comprised an antisense strand having a region of complementarity to mRNA encoding TUBB3.

[1443] Oligonucleotide-lipid conjugates that were evaluated included those having the structures of Compounds 144, 218-222, 224-232, and 279-285 as shown in FIGS. 35A-35E, compared to the parent oligonucleotide-lipid conjugates of Compounds 137, 140, 217, and 277-278. Each of Compounds 137, 140, 217, and 277-278 contain a blunt end at the 3′ terminus of the sense strand, and a 2-nt antisense strand overhang at the 3′ terminus. Compounds 218-222 and 277-278 comprise a sense strand 16 nucleotides in length. Compounds 140, and 224-227 comprise a sense strand 14 nucleotides in length. Compounds 228-232 comprise a sense strand 12 nucleotides in length. Compounds 279-285 comprise a sense strand 10 nucleotides in length.

[1444] Compounds 140, 144, 217-222, 224-232 and 279-283 comprise locked nucleic acids on the sense strand at the nucleotides complementary to nucleotides 5 and 6 of the antisense strand. Compounds 277 and 284 comprise locked nucleic acids on the sense strand at the nucleotides complementary to nucleotides 6 and 7 of the antisense strand. Compounds 278 and 285 comprise locked nucleic acids on the sense strand at the nucleotides complementary to nucleotides 7 and 8 of the antisense strand. Compounds 140, 144, 217-222, 224-232 and 277-285 comprise a locked nucleic acid on position 2 of the sense strand.

[1445] Compounds 137, 140, 217, 277, and 278 comprise phosphorothioate linkages between positions: 1 and 2, 18 and 19, and 19 and 20 of the sense strand; 1 and 2, 2 and 3, 3 and 4, 20 and 21, and 21 and 22, of the antisense strand. Compounds 217 and 277-278 comprises additional phosphorothioate linkages between positions 13 and 14 and 14 and 15 of the antisense strand. Compounds 218-222 comprise phosphorothioate linkages between positions: 1 and 2, 14 and 15, and 15 and 16, of the sense strand; 1 and 2, 2 and 3, 3 and 4, 20 and 21, and 21 and 22, of the antisense strand. Compounds 144, and 224-227 comprise phosphorothioate linkages between positions: 1 and 2, 12 and 13, and 13 and 14, of the sense strand; 1 and 2, 2 and 3, 3 and 4, 13 and 14, 14 and 15, 20 and 21, and 21 and 22, of the antisense strand. Compounds 228-232 comprise phosphorothioate linkages between positions: 1 and 2, 10 and 11, and 11 and 12, of the sense strand; 1 and 2, 2 and 3, 3 and 4, 13 and 14, 14 and 15, 20 and 21, and 21 and 22, of the antisense strand. Compounds 279-285 comprise phosphorothioate linkages between positions 1 and 2, 8 and 9, and 9 and 10 of the sense strand; 1 and 2, 2 and 3, 3 and 4, 13 and 14, 14 and 15, 20 and 21, and 21 and 22, of the antisense strand.

[1446] Compounds 137, 140, 144, 217-222, 224-232, and 278-285 comprise a C16 lipid conjugated at position 1 of the sense strand.

[1447] The compounds comprise different length 5′ and 3′ overhangs of the antisense strand as further described below:
[1448] (i) Compounds 137, 140, 217, 277, and 278 comprise a 2-nt antisense strand overhang at the 3′ terminus.
[1449] (ii) Compound 218 comprises a 6-nt antisense strand overhang at the 3′ terminus.
[1450] (iii) Compound 219 comprises a 5-nt antisense strand overhang at the 3′ terminus and a 1-nt antisense strand overhang at the 5′ terminus.
[1451] (iv) Compound 220 comprises a 4-nt antisense strand overhang at the 3′ terminus and a 2-nt antisense strand overhang at the 5′ terminus.
[1452] (v) Compound 221 comprises a 3-nt antisense strand overhang at the 3′ terminus and a 3-nt antisense strand overhang at the 5′ terminus.
[1453] (vi) Compound 222 comprises a 2-nt antisense strand overhang at the 3′ terminus and a 4-nt antisense strand overhang at the 5′ terminus.
[1454] (vii) Compound 144 comprises a 8-nt antisense strand overhang at the 3′ terminus.
[1455] (viii) Compound 224 comprises a 7-nt antisense strand overhang at the 3′ terminus and a 1-nt antisense strand overhang at the 5′ terminus.
[1456] (ix) Compound 225 comprises a 6-nt antisense strand overhang at the 3′ terminus and a 2-nt antisense strand overhang at the 5′ terminus.
[1457] (x) Compound 226 comprises a 5-nt antisense strand overhang at the 3′ terminus and a 3-nt antisense strand overhang at the 5′ terminus.
[1458] (xi) Compound 227 comprises a 4-nt antisense strand overhang at the 3′ terminus and a 4-nt antisense strand overhang at the 5′ terminus.
[1459] (xii) Compound 228 comprises a 10-nt antisense strand overhang.
[1460] (xiii) Compound 229 comprises a 9-nt antisense strand overhang at the 3′ terminus and a 1-nt antisense strand overhang at the 5′ terminus.
[1461] (xiv) Compound 230 comprises a 8-nt antisense strand overhang at the 3′ terminus and a 2-nt antisense strand overhang at the 5′ terminus.
[1462] (xv) Compound 231 comprises a 7-nt antisense strand overhang at the 3′ terminus and a 3-nt antisense strand overhang at the 5′ terminus.
[1463] (xvi) Compound 232 comprises a 6-nt antisense strand overhang at the 3′ terminus and a 4-nt antisense strand overhang at the 5′ terminus.
[1464] (xvii) Compound 279 comprises a 12-nt antisense strand overhang at the 3′ terminus.
[1465] (xviii) Compound 280 comprises a 11-nt antisense strand overhang at the 3′ terminus and a 1-nt antisense strand overhang at the 5′ terminus.
[1466] (xix) Compound 281 comprises a 10-nt antisense strand overhang at the 3′ terminus and a 2-nt antisense strand overhang at the 5′ terminus.
[1467] (xx) Compound 282 comprises a 9-nt antisense strand overhang at the 3′ terminus and a 3-nt antisense strand overhang at the 5′ terminus.
[1468] (xxi) Compound 283 comprises a 8-nt antisense strand overhang at the 3′ terminus and a 4-nt antisense strand overhang at the 5′ terminus.
[1469] (xxii) Compound 284 comprises a 7-nt antisense strand overhang at the 3′ terminus and a 5-nt antisense strand overhang at the 5′ terminus.
[1470] (xxiii) Compound 285 comprises a 6-nt antisense strand overhang at the 3′ terminus and a 6-nt antisense strand overhang at the 5′ terminus.

[1471] To evaluate the RNAi oligonucleotide-lipid conjugates, 6 to 10 week old C57BL6 mice were given a single intrathecal (i.t.) injection of 500 μg oligonucleotide-lipid conjugate formulated in artificial cerebrospinal fluid (aCSF). The RNAi oligonucleotide-lipid conjugate administered to each animal group is outlined in Table 21. Control mice received artificial cerebrospinal fluid (aCSF) only.

TABLE 21
TUBB3 RNAi oligonucleotides administered to animals

| | | Sense | | Antisense | |
|---|---|---|---|---|---|
| | Compound | SEQ ID NOS | | SEQ ID NOS | |
| Group | ID | Unmod | Mod | Unmod | Mod |

Controls

| | | | | | |
|---|---|---|---|---|---|
| | aCSF | — | — | — | — |
| 5′C16 Blunt | 173 | 583 | 586 | 596 | 597 |
| 5′C16 Blunt + LNA | 176 | 583 | 589 | 596 | 597 |
| 5′C16 Blunt + LNA + | 217 | 372 | 541 | 324 | 533 |
| g14 2′F PS | | | | | |

16mer Sense Strands

| | | | | | |
|---|---|---|---|---|---|
| 16mer, g1 | 218 | 549 | 554 | 324 | 533 |
| 16mer, g2 | 219 | 630 | 686 | 324 | 533 |
| 16mer, g3 | 220 | 63 | 687 | 324 | 533 |
| 16mer, g4 | 221 | 632 | 688 | 324 | 533 |
| 16mer, g5 | 222 | 443 | 465 | 324 | 533 |

14mer Sense Strands

| | | | | | |
|---|---|---|---|---|---|
| 14mer, g1 | 144 | 537 | 545 | 324 | 533 |
| 14mer, g2 | 224 | 633 | 689 | 324 | 533 |
| 14mer, g3 | 225 | 634 | 690 | 324 | 533 |
| 14mer, g4 | 226 | 635 | 691 | 324 | 533 |
| 14mer, g5 | 227 | 636 | 692 | 324 | 533 |

12mer Sense Strands

| | | | | | |
|---|---|---|---|---|---|
| 12mer, g1 | 228 | 557 | 562 | 324 | 533 |
| 12mer, g2 | 229 | 637 | 693 | 324 | 533 |
| 12mer, g3 | 230 | 638 | 694 | 324 | 533 |
| 12mer, g4 | 231 | 639 | 695 | 324 | 533 |
| 12mer, g5 | 232 | 640 | 696 | 324 | 533 |

10mer Sense Strands and controls

| | | | | | |
|---|---|---|---|---|---|
| 5′ C16 Full, LNA P2, | 277 | 644 | 729 | 324 | 533 |
| P14, P15 (g14 2′F | | | | | |
| PS) | | | | | |
| 5′ C16 Full, LNA P2, | 278 | 644 | 730 | 324 | 533 |
| P13, P14 (g14 2′F | | | | | |
| PS) | | | | | |
| 10mer, g1 | 279 | 665 | 731 | 324 | 533 |
| 10mer, g2 | 280 | 666 | 732 | 324 | 533 |
| 10mer, g3 | 281 | 667 | 733 | 324 | 533 |
| 10mer, g4 | 282 | 668 | 734 | 324 | 533 |
| 10mer, g5 | 283 | 669 | 735 | 324 | 533 |
| 10mer, g6 | 284 | 670 | 736 | 324 | 533 |
| 10mer, g7 | 285 | 671 | 737 | 324 | 533 |

[1472] Target mRNA knockdown was assessed 28 days post-injection. RNA was extracted from CNS tissue and murine TUBB3 mRNA levels were determined as described in Example 2.

[1473] Percent TUBB3 mRNA expression remaining in the frontal cortex, hippocampus, medulla, and lumbar spinal cord following treatment with Compounds 173, 176, and 217-232 is respectively shown in FIGS. 36A-36D. Percent TUBB3 mRNA expression remaining in the frontal cortex, hippocampus, hypothalamus, cerebellum, brain stem, and lumbar spinal cord following treatment with Compounds 140, 277, 278, 231, and 279-285 is respectively shown in FIG. 36E. Silencing of TUBB3 mRNA expression was observed in all tissues evaluated for most treatment groups. Silencing of TUBB3 mRNA expression was observed in the lumbar spinal cord following treatment with all RNAi oligonucleotides-lipid conjugates tested. Inhibition was further observed in the medulla, hippocampus, and frontal cortex following treatment with all RNAi oligonucleotide-lipid conjugates tested comprising a sense strand 12 nucleotides in length. Silencing of TUBB3 mRNA expression was observed in all CNS regions evaluated following treatment with Compounds 228-232, Compound 281, or Compound 283. Together, these results demonstrate the ability of RNAi oligonucleotide-lipid conjugates having truncated sense strands to inhibit neuronal gene targets in various regions and tissues of the CNS.

### Example 22: Impact of Lipid Position on Truncated Sense Strand Oligonucleotides with 5′ and 3′ Overhangs for Inhibition of an Astrocyte Target Gene in the CNS

[1474] RNAi oligonucleotide-lipid conjugates were evaluated to determine the effect of lipid position on oligonucleotides with 5′ and/or 3′ truncations on the sense strand. Each oligonucleotide-lipid conjugate tested comprised an antisense strand having a region of complementarity to mRNA encoding GFAP.

[1475] Oligonucleotide-lipid conjugates that were evaluated included those having the structures of Compounds 234-245 as shown in FIGS. 37A-37B, compared to the parent oligonucleotide-lipid conjugates of Compounds 173, 176, and 233. Each of Compounds 173, 176, 233-236, and 240-242 contain a blunt end at the 3′ terminus of the sense strand. Compounds 173, 176, and 233 contain a 2-nt overhang on the 3′ terminus of the antisense strand. Compounds 234-245 contain a 6-nt overhang on the 3′ terminus of the antisense strand. Compounds 234-236 and 240-242 comprise a sense strand 16 nucleotides in length. Compounds and 237-239 and 243-245 comprise a sense strand 14 nucleotides in length.

[1476] Compound 176 comprises locked nucleic acids on the sense strand at nucleotide positions 2, 15, and 16. Compound 233 comprises locked nucleic acids on the sense strand at nucleotide positions 6, 15, and 16. Compounds 240-245 comprise locked nucleic acids on the sense strand at the nucleotide positions 2, 11, and 12.

[1477] Compounds 173, 176, and 233 comprise phosphorothioate linkages between positions: 1 and 2, 18 and 19, and 19 and 20 of the sense strand; 1 and 2, 2 and 3, 3 and 4, 20 and 21, and 21 and 22, of the antisense strand. Compound 234-236 and 240-242 comprise phosphorothioate linkages between positions: 1 and 2, 14 and 15, and 15 and 16, of the sense strand; 1 and 2, 2 and 3, 3 and 4, 20 and 21, and 21 and 22, of the antisense strand. Compounds 237-239 and 243-245 comprise phosphorothioate linkages between positions: 1 and 2, 12 and 13, and 13 and 14, of the sense strand; 1 and 2, 2 and 3, 3 and 4, 13 and 14, 14 and 15, 20 and 21, and 21 and 22, of the antisense strand.

[1478] The compounds comprise a C16 lipid conjugated at a different position of the sense strand as further described below:
[1479] (i) Compounds 173, 176, 233, 234, 237, 240, and 243 comprise a C16 lipid at position 1.
[1480] (ii) Compounds 235, 238, 241, and 244 comprise a C16 lipid at position 3.
[1481] (iii) Compounds 236, 239, 242, and 245 comprise a C16 lipid at position 5.

[1482] To evaluate the RNAi oligonucleotide-lipid conjugates, 6 to 10 week old C57BL6 mice were given a single intrathecal (i.t.) injection of 100 μg oligonucleotide-lipid conjugate formulated in artificial cerebrospinal fluid (aCSF). The RNAi oligonucleotide-lipid conjugate administered to each animal group is outlined in Table 22. Control mice received artificial cerebrospinal fluid (aCSF) only.

TABLE 22
GFAP RNAi oligonucleotides administered to animals

| | Compound | Sense SEQ ID NOS | | Antisense SEQ ID NOS | |
|---|---|---|---|---|---|
| Group | ID | Unmod | Mod | Unmod | Mod |

Controls

| | | | | | |
|---|---|---|---|---|---|
| | aCSF | — | — | — | — |
| B | 173 | 583 | 586 | 596 | 597 |
| C | 176 | 583 | 589 | 596 | 597 |
| D | 233 | 614 | 697 | 596 | |

P-4

| | | | | | |
|---|---|---|---|---|---|
| E | 234 | 641 | 698 | 596 | 597 |
| F | 235 | 641 | 699 | 596 | 597 |
| G | 236 | 641 | 700 | 596 | 597 |

Dual Truncation

| | | | | | |
|---|---|---|---|---|---|
| H | 237 | 642 | 701 | 596 | 597 |
| I | 238 | 642 | 702 | 596 | 597 |
| J | 239 | 642 | 703 | 596 | 597 |

P-4 with LNA

| | | | | | |
|---|---|---|---|---|---|
| K | 240 | 615 | 672 | 596 | 597 |
| L | 241 | 615 | 704 | 596 | 597 |
| M | 242 | 615 | 705 | 596 | 597 |

Dual Truncation with LNA

| | | | | | |
|---|---|---|---|---|---|
| N | 243 | 622 | 678 | 596 | 597 |
| O | 244 | 622 | 706 | 596 | 597 |
| P | 245 | 622 | 707 | 596 | 597 |

[1483] Target knockdown was assessed 28 days post-injection. RNA was extracted from CNS tissue and murine GFAP mRNA levels were determined as described in Example 17.

[1484] Percent GFAP mRNA expression in the frontal cortex, hippocampus, medulla, and lumbar spinal cord as measured for each treatment group is respectively shown in FIGS. 38A-38D. Silencing of GFAP mRNA expression was observed in medulla and lumbar spinal cord following treatment with all RNAi oligonucleotide-lipid conjugates tested. Inclusion of locked nucleic acids in oligonucleotides comprising 5′ and 3′ truncations improved the knockdown of the astrocyte target.

### Example 23: Impact of Lipid Position on Truncated Sense Strands with Locked Nucleic Acids for Inhibition of an Astrocyte Target Gene in the CNS

[1485] RNAi oligonucleotide-lipid conjugates were evaluated to determine the effect of lipid position on oligonucleotides locked nucleic acids and 5′ and/or 3′ truncations on the sense strand. Each oligonucleotide-lipid conjugate tested comprised an antisense strand having a region of complementarity to mRNA encoding GFAP.

[1486] Oligonucleotide-lipid conjugates that were evaluated included those having the structures of Compounds 248-255 as shown in FIGS. 39A-39B, compared to the parent oligonucleotide-lipid conjugates of Compounds 173, 176, and 200 and 246-247. Each of Compounds 173, 176, and 200 and 246-251 contain a blunt end at the 3′ terminus of the sense strand. Compounds 252-255 contain a 2-nt overhang on the 5′ terminus of the antisense strand. Compounds 248-255 contain a 8-nt overhang on the 3′ terminus of the antisense strand. Compounds 173, 176, 200 and 246-247 comprise a sense strand 14 nucleotides in length. Compounds 248-250 comprise a sense strand 14 nucleotides in length. Compounds and 253-255 comprise a sense strand 12 nucleotides in length.

[1487] Compounds 176, 200 comprise locked nucleic acids on the sense strand at nucleotide positions 2, 15, and 16. Compound 247 comprises locked nucleic acids on the sense strand at nucleotide positions 8, 15, and 16. Compounds 250, 251, 254, and 255 comprise locked nucleic acids on the sense strand at the nucleotide positions 2, 9, and 10.

[1488] Compounds 173, 176, 200, 246, and 233 comprise phosphorothioate linkages between positions: 1 and 2, 18 and 19, and 19 and 20 of the sense strand. Compound 248, 250-252, and 254-255 comprise phosphorothioate linkages between positions: 1 and 2, 12 and 13, and 13 and 14, of the sense strand. Compounds 249 and 253 comprise phosphorothioate linkages between positions 12 and 13 and 13 and 14. Compounds 173, 176, 200, and 246-255 comprise phosphorothioate linkages between positions 1 and 2, 2 and 3, 3 and 4, 13 and 14, 14 and 15, 20 and 21, and 21 and 22, of the antisense strand.

[1489] The compounds comprise a C16 lipid conjugated at a different position of the sense strand as further described below:
[1490] (i) Compounds 173, 176, 200, 246-248, 250, 252, and 254 comprise a C16 lipid at position 1.
[1491] (ii) Compounds 249, 251, 253, and 255, comprise a C16 lipid at position 3.

[1492] To evaluate the RNAi oligonucleotide-lipid conjugates, 6 to 10 week old C57BL6 mice were given a single intrathecal (i.t.) injection of 100 μg oligonucleotide-lipid conjugate formulated in artificial cerebrospinal fluid (aCSF). The RNAi oligonucleotide-lipid conjugate administered to each animal group is outlined in Table 23. Control mice received artificial cerebrospinal fluid (aCSF) only.

TABLE 23
GFAP RNAi oligonucleotides administered to animals

| | Sense | | Antisense | |
|---|---|---|---|---|
| Compound | SEQ ID NOS | | SEQ ID NOS | |
| ID | Unmod | Mod | Unmod | Mod |

Controls

| | | | | | |
|---|---|---|---|---|---|
| | aCSF | — | — | — | — |
| B | 173 | 583 | 586 | 596 | 597 |
| C | 176 | 583 | 589 | 596 | 597 |
| D | 200 | 614 | 589 | 596 | 598 |
| E | 246 | 583 | 586 | 596 | 598 |
| F | 247 | 614 | 708 | 596 | 598 |

P-6

| | | | | | |
|---|---|---|---|---|---|
| G | 248 | 584 | 709 | 596 | 598 |
| H | 249 | 584 | 710 | 596 | 598 |

P-6 LNA

| | | | | | |
|---|---|---|---|---|---|
| I | 250 | 620 | 593 | 596 | 598 |
| J | 251 | 620 | 711 | 596 | 598 |

Dual Truncation

| | | | | | |
|---|---|---|---|---|---|
| K | 252 | 643 | 712 | 596 | 598 |
| L | 253 | 643 | 713 | 596 | 598 |

Dual Truncation with LNA

| | | | | | |
|---|---|---|---|---|---|
| M | 254 | 627 | 683 | 596 | 598 |
| N | 255 | 627 | 714 | 596 | 598 |

[1493] Target knockdown was assessed 28 days post-injection. RNA was extracted from CNS tissue and murine GFAP mRNA levels were determined as described in Example 17.

[1494] Percent GFAP mRNA expression in the frontal cortex, hippocampus, medulla, and lumbar spinal cord as measured for each treatment group is respectively shown in FIGS. 40A-40D. Silencing of GFAP mRNA expression was observed in medulla and lumbar spinal cord following treatment with all RNAi oligonucleotide-lipid conjugates tested. These results demonstrate the ability of RNAi oligonucleotide-lipid conjugates having truncated sense strand to inhibit astrocyte gene targets in various regions and tissues of the CNS.

### Example 24: Impact of Lipid Position on Truncated Sense Strand Oligonucleotides with 5′ and 3′ Overhangs for Inhibition of a Neuronal Target Gene in the CNS

[1495] RNAi oligonucleotide-lipid conjugates were evaluated to determine the effect of lipid position on oligonucleotides with 5′ and/or 3′ truncations on the sense strand. Each oligonucleotide-lipid conjugate tested comprised an antisense strand having a region of complementarity to mRNA encoding TUBB3.

[1496] Oligonucleotide-lipid conjugates that were evaluated included those having the structures of Compounds 257-268 as shown in FIGS. 41A-41B, compared to the parent oligonucleotide-lipid conjugates of Compounds 137, 140, and 256. Each of Compounds 137, 140, 152, 256-259, and 264-265 contain a blunt end at the 3′ terminus of the sense strand. Compounds 137, 140, and 256 contain a 2-nt overhang on the 3′ terminus of the antisense strand. Compounds 257-268 contain a 6-nt overhang on the 3′ terminus of the antisense strand. Compounds 152, 257-259 and 264-265 comprise a sense strand 16 nucleotides in length. Compounds and 260-262 and 266-268 comprise a sense strand 14 nucleotides in length.

[1497] Compound 140 comprises locked nucleic acids on the sense strand at nucleotide positions 2, 15, and 16. Compound 256 comprises locked nucleic acids on the sense strand at nucleotide positions 6, 15, and 16. Compounds 152, and 264-268 comprise locked nucleic acids on the sense strand at the nucleotide positions 2, 11, and 12.

[1498] Compounds 137, 140, and 256 comprise phosphorothioate linkages between positions: 1 and 2, 18 and 19, and 19 and 20 of the sense strand; 1 and 2, 2 and 3, 3 and 4, 20 and 21, and 21 and 22, of the antisense strand. Compounds 152, 257-259, and 264-265 comprise phosphorothioate linkages between positions: 1 and 2, 14 and 15, and 15 and 16, of the sense strand; 1 and 2, 2 and 3, 3 and 4, 20 and 21, and 21 and 22, of the antisense strand. Compounds 260-262 and 266-268 comprise phosphorothioate linkages between positions: 1 and 2, 12 and 13, and 13 and 14, of the sense strand; 1 and 2, 2 and 3, 3 and 4, 13 and 14, 14 and 15, 20 and 21, and 21 and 22, of the antisense strand.

[1499] The compounds comprise a C16 lipid conjugated at a different position of the sense strand as further described below:
[1500] (i) Compounds 137, 140, 256, 257, 260, 152, and 266 comprise a C16 lipid at position 1.
[1501] (ii) Compounds 258, 261, 264, and 267 comprise a C16 lipid at position 3.
[1502] (iii) Compounds 259, 262, 265, and 268 comprise a C16 lipid at position 5.

[1503] To evaluate the RNAi oligonucleotide-lipid conjugates, 6 to 10 week old C57BL6 mice were given a single intrathecal (i.t.) injection of 500 μg oligonucleotide-lipid conjugate formulated in artificial cerebrospinal fluid (aCSF). The RNAi oligonucleotide-lipid conjugate administered to each animal group is outlined in Table 24. Control mice received artificial cerebrospinal fluid (aCSF) only.

TABLE 24
TUBB 3 RNAi oligonucleotides administered to animals

| | Sense | | Antisense | |
|---|---|---|---|---|
| Compound | SEQ ID NOS | | SEQ ID NOS | |
| ID | Unmod | Mod | Unmod | Mod |

Controls

| | | | | | |
|---|---|---|---|---|---|
| | aCSF | — | — | — | — |
| B | 137 | 372 | 386 | 324 | 352 |
| C | 140 | 372 | 541 | 324 | 352 |
| D | 256 | 372 | 715 | 324 | 352 |

5′ P-4 Truncation

| | | | | | |
|---|---|---|---|---|---|
| E | 257 | 549 | 551 | 324 | 352 |
| F | 258 | 549 | 608 | 324 | 352 |
| G | 259 | 549 | 610 | 324 | 352 |

Dual Truncations

| | | | | | |
|---|---|---|---|---|---|
| H | 260 | 634 | 716 | 324 | 352 |
| I | 261 | 634 | 717 | 324 | 352 |
| J | 262 | 634 | 718 | 324 | 352 |

5′ P-4 Truncation with LNA

| | | | | | |
|---|---|---|---|---|---|
| K | 152 | 549 | 554 | 324 | 352 |
| L | 264 | 549 | 718 | 324 | 352 |
| M | 265 | 549 | 720 | 324 | 352 |

Dual Truncation with LNA

| | | | | | |
|---|---|---|---|---|---|
| N | 266 | 634 | 690 | 324 | 352 |
| O | 267 | 634 | 721 | 324 | 352 |
| P | 268 | 634 | 722 | 324 | 352 |

[1504] Target knockdown was assessed 28 days post-injection. RNA was extracted from CNS tissue and murine TUBB3 mRNA levels were determined as described in Example 2.

[1505] Percent TUBB3 mRNA expression in the frontal cortex, hippocampus, medulla, and lumbar spinal cord as measured for each treatment group is respectively shown in FIGS. 42A-42D. Silencing of TUBB3 mRNA expression was observed in the lumbar spinal cord and medulla following treatment with all RNAi oligonucleotide-lipid conjugates tested. Inhibition was further observed in hippocampus and frontal cortex following treatment with all RNAi oligonucleotide-lipid conjugates tested comprising a sense strand having a 5′ and 3′ truncation and LNAs (e.g., Compounds 266-268).

### Example 25: Impact of Lipid Position on Truncated Sense Strands with Locked Nucleic Acids for Inhibition of a Neuronal Target Gene in the CNS

[1506] RNAi oligonucleotide-lipid conjugates were evaluated to determine the effect of lipid position on oligonucleotides with and without locked nucleic acids and 5′ and/or 3′ truncations on the sense strand. Each oligonucleotide-lipid conjugate tested comprised an antisense strand having a region of complementarity to mRNA encoding TUBB3.

[1507] Oligonucleotide-lipid conjugates that were evaluated included those having the structures of Compounds 144, and 272-276 as shown in FIGS. 43A-43B, compared to the parent oligonucleotide-lipid conjugates of Compounds 137, 140, 217, 269, and 270. Each of Compounds 137, 140, 217, and 269-272 contain a blunt end at the 3′ terminus of the sense strand. Compounds 137, 140, 217, 269, and 270 contain a 2-nt overhang on the 5′ terminus of the antisense strand. Compounds 144, and 272-276 contain a 8-nt overhang on the 3′ terminus of the antisense strand. Compounds 144 and 272 comprise a sense strand 14 nucleotides in length. Compounds 273-276 comprise a sense strand 12 nucleotides in length.

[1508] Compounds 140 and 217 comprise locked nucleic acids on the sense strand at nucleotide positions 2, 15, and 16. Compound 270 comprises locked nucleic acids on the sense strand at nucleotide positions 8, 15, and 16. Compounds 144, 272, 275, and 276 comprise locked nucleic acids on the sense strand at the nucleotide positions 2, 9, and 10.

[1509] Compounds 137, 140, 217, 269, and 270 comprise phosphorothioate linkages between positions: 1 and 2, 18 and 19, and 19 and 20 of the sense strand. Compounds 144 and 272 comprise phosphorothioate linkages between positions: 1 and 2, 12 and 13, and 13 and 14, of the sense strand. Compounds 273-276 comprise phosphorothioate linkages between positions: 1 and 2, 11 and 12, and 12 and 13, of the sense strand. Compounds 137 and 140 comprise phosphorothioate linkages between positions 1 and 2, 2 and 3, 3 and 4, 20 and 21, and 21 and 22, of the antisense strand. Compounds 217, and 269-276 comprise phosphorothioate linkages between positions 1 and 2, 2 and 3, 3 and 4, 13 and 14, 14 and 15, 20 and 21, and 21 and 22, of the antisense strand.

[1510] The compounds comprise a C16 lipid conjugated at a different position of the sense strand as further described below:
[1511] (i) Compounds 137, 140, 217, 269-270, 144, 273, and 275 comprise a C16 lipid at position 1.
[1512] (ii) Compounds 272, 274, and 276, comprise a C16 lipid at position 3.

[1513] To evaluate the RNAi oligonucleotide-lipid conjugates, 6 to 10 week old C57BL6 mice were given a single intrathecal (i.t.) injection of 500 μg oligonucleotide-lipid conjugate formulated in artificial cerebrospinal fluid (aCSF). The RNAi oligonucleotide-lipid conjugate administered to each animal group is outlined in Table 25. Control mice received artificial cerebrospinal fluid (aCSF) only.

TABLE 25
TUBB3 RNAi oligonucleotides administered to animals

| | Sense | | Antisense | |
|---|---|---|---|---|
| Compound | SEQ ID NOS | | SEQ ID NOS | |
| ID | Unmod | Mod | Unmod | Mod |

Controls

| | | | | | |
|---|---|---|---|---|---|
| | aCSF | — | — | — | — |
| B | 137 | 372 | 386 | 324 | 352 |
| C | 140 | 372 | 541 | 324 | 352 |
| D | 217 | 372 | 541 | 324 | 533 |
| E | 269 | 372 | 386 | 324 | 533 |
| F | 270 | 372 | 723 | 324 | 533 |

P-6 LNA

| | | | | | |
|---|---|---|---|---|---|
| I | 144 | 537 | 545 | 324 | 533 |
| J | 272 | 537 | 724 | 324 | 533 |

Dual Truncation

| | | | | | |
|---|---|---|---|---|---|
| K | 273 | 638 | 725 | 324 | 533 |
| L | 274 | 638 | 726 | 324 | 533 |

Dual Truncation with LNA

| | | | | | |
|---|---|---|---|---|---|
| M | 275 | 638 | 727 | 324 | 533 |
| N | 276 | 638 | 728 | 324 | 533 |

[1514] Target knockdown was assessed 28 days post-injection. RNA was extracted from CNS tissue and murine TUBB3 mRNA levels were determined as described in Example 2.

[1515] Percent TUBB3 mRNA expression remaining in the frontal cortex, hippocampus, medulla, and lumbar spinal cord as measured for each treatment group is respectively shown in FIGS. 44A-44D. Silencing of TUBB3 mRNA expression was observed in all tissues evaluated for most treatment groups. Silencing of TUBB3 mRNA expression was observed in the lumber spinal cord and medulla with all RNAi oligonucleotide-lipid conjugates tested. Addition of locked nucleic acids increased reduction of TUBB3 inhibition. Further, conjugation of a lipid at the 5′ terminal nucleotide of the sense strand provided enhanced knockdown across tissues. Together this data demonstrates the ability of RNAi oligonucleotide-lipid conjugates having truncated sense strands and/or LNAs inhibition of neuronal targets in various regions and tissues of the CNS.

### Example 26: Impact of 3′ Sense Strand Truncation for Inhibition of Target Gene in Tissue Outside the Central Nervous Tissue

[1516] RNAi oligonucleotide-lipid conjugates were evaluated to determine the effect of 3′ truncations on the sense strand. Each oligonucleotide-lipid conjugate tested comprised an antisense strand having a region of complementarity to mRNA encoding ALDH2.

[1517] Oligonucleotide-lipid conjugates that were evaluated included those having the structures of Compounds 287-292 as shown in FIG. 45, compared to the parent oligonucleotide-lipid conjugates of Compounds 286. Each of Compounds 286-292 contain a a 2-nt overhang on the 5′ terminus of the antisense strand. Compound 287 contains a 1-nt overhang on the 3′ terminus of the antisense strand. Compound 288 contains a 2-nt overhang on the 3′ terminus of the antisense strand. Compound 289 contains a 3-nt overhang on the 3′ terminus of the antisense strand. Compounds 290 and 291 contain a 4-nt overhang on the 3′ terminus of the antisense strand.

[1518] Compounds 286 and 292 comprise phosphorothioate linkages between positions: 1 and 2, 18 and 19, and 19 and 20 of the sense strand. Compound 287 comprises phosphorothioate linkages between positions: 1 and 2, 17 and 18, and 18 and 19 of the sense strand. Compound 288 comprises phosphorothioate linkages between positions: 1 and 2, 16 and 17, and 17 and 18, of the sense strand. Compound 289 comprises phosphorothioate linkages between positions 1 and 2, 15 and 16, and 16 and 17 of the sense strand. Compounds 290 and 291 comprise phosphorothioate linkages between positions 1 and 2, 14 and 15, and 15 and 16 of the sense strand. Compounds 286-290 comprise phosphorothioate linkages between positions 1 and 2, 2 and 3, 3 and 4, 20 and 21, and 21 and 22, of the antisense strand. Compounds 291 and 292 comprise phosphorothioate linkages between positions 1 and 2, 2 and 3, 3 and 4, 4 and 5, 20 and 21, and 21 and 22, of the antisense strand.

[1519] Compounds 286-292 comprise a C22 lipid conjugated to position 1 of the sense strand.

[1520] To evaluate the RNAi oligonucleotide-lipid conjugates, 6 to 10 week old C57BL6 mice were given a single 15 mg/kg subcutaneous (s.c.) injection of oligonucleotide-lipid conjugate formulated in phosphate buffered saline (PBS). The RNAi oligonucleotide-lipid conjugate administered to each animal group is outlined in Table 26. Control mice received PBS only.

TABLE 26
GFAP RNAi oligonucleotides administered to animals

| Compound | Sense SEQ ID NOS | | Antisense SEQ ID NOS | |
|---|---|---|---|---|
| ID | Unmod | Mod | Unmod | Mod |

Controls

| | | | | | |
|---|---|---|---|---|---|
| | PBS | — | — | — | — |
| A | 286 | 742 | 747 | 205 | 752 |
| B | 287 | 743 | 748 | 205 | 752 |
| C | 288 | 744 | 749 | 205 | 752 |
| D | 289 | 745 | 750 | 205 | 752 |
| E | 290 | 746 | 751 | 205 | 752 |
| F | 291 | 746 | 751 | 205 | 753 |
| G | 292 | 742 | 747 | 205 | 753 |

[1521] Target knockdown was assessed 13 days post-injection. RNA was extracted from liver, quadricep, heart, and gonadal white adipose tissue (gWAT), and murine ALDH2 mRNA levels were determined as described in Example 11.

[1522] Percent ALDH2 mRNA expression remaining in the liver, quadricep, heart, and gWAT as measured for each treatment group is respectively shown in FIGS. 46A-46D. Silencing of ALDH2 mRNA expression was observed in all tissues. Specifically, 3′ truncations of the sense strand were capable of inhibiting gene expression across the various tissues. Together, this data demonstrates the ability of truncated molecules to reduce gene expression in tissues outside the CNS.

### Example 27: Truncated Sense Strand Oligonucleotides with 5′ and 3′ Overhangs for Inhibition of Oligodendrocyte Target Gene in the CNS

[1523] RNAi oligonucleotides with 5′ and/or 3′ sense strand truncations were evaluated for their ability to reduce oligodendrocyte target expression in the CNS. Each oligonucleotide-lipid conjugate tested comprised an antisense strand having a region of complementarity to mRNA encoding UGT8.

[1524] Oligonucleotide-lipid conjugates that were evaluated included those having the structures of Compounds 167, 293, and 294 as shown in FIG. 47, compared to the parent oligonucleotide-lipid conjugate of Compound 162. Each of compounds 162, 167, 293, and 294 comprise a C16 lipid at position 1 of the sense strand. Each of Compounds 162 and 167 contain a blunt end at the 3′ terminus of the sense strand. Compounds 293 and 294 contain a 3-nt overhand on the 5′ terminus of the antisense strand. Compounds 167 and 294 contain an 8-nt overhand on the 3′ terminus of the antisense strand.

[1525] Compounds 162 comprises a phosphorothioate linkages between positions: 1 and 2, 18 and 19, and 19 and 20 of the sense strand. Compound 167 comprises phosphorothioate linkages between positions: 1 and 2, 12 and 13, and 13 and 14, of the sense strand. Compound 293 comprises phosphorothioate linkages between positions: 1 and 2, 15 and 16, and 16 and 17, of the sense strand. Compound 294 comprises phosphorothioate linkages between positions: 1 and 2, 9 and 10, and 10 and 11, of the sense strand. Compounds 162 and 293 comprise phosphorothioate linkages between positions 1 and 2, 2 and 3, 3 and 4, 20 and 21, and 21 and 22, of the antisense strand. Compounds 167 and 294 comprise phosphorothioate linkages between positions 1 and 2, 2 and 3, 3 and 4, 13 and 14, 14 and 15, 20 and 21, and 21 and 22, of the antisense strand.

[1526] To evaluate the RNAi oligonucleotide-lipid conjugates, 6 to 10 week old C57BL6 mice were given a single intrathecal (i.t.) injection of 300 μg oligonucleotide-lipid conjugate formulated in artificial cerebrospinal fluid (aCSF). The RNAi oligonucleotide-lipid conjugate administered to each animal group is outlined in Table 27. Control mice received artificial cerebrospinal fluid (aCSF) only.

TABLE 27
Truncated RNAi Oligonucleotides

| | | Sense | | Antisense | |
|---|---|---|---|---|---|
| | | SEQ ID NOS | | SEQ ID NOs | |
| Compound | Oligonucleotide | Unmod | Mod | Unmod | Mod |
| | aCSF | — | — | — | — |
| 162 | 2-nt 5′ Truncated | 565 | 567 | 577 | 578 |
| 167 | 8-nt 5′ Truncated Sense | 566 | 572 | 577 | 579 |
| | Strand | | | | |
| 293 | 2-nt 5′ Truncated and | 738 | 740 | 577 | 578 |
| | 3-nt 3′ Truncated | | | | |
| 294 | 8-nt 5′ Truncated and | 739 | 741 | 577 | 579 |
| | 3-nt 3′ Truncated | | | | |

[1527] Target knockdown was assessed 28 days post-injection. RNA was extracted from CNS tissue and murine UGT8 mRNA levels were determined as described in Example 2. Percent UGT8 mRNA expression remaining in the frontal cortex, hippocampus, brain stem, and lumbar spinal cord as measured for each treatment group is respectively shown in FIGS. 48A-48D. Silencing of UGT8 mRNA expression was observed in all tissues. Specifically, truncations of the sense strand greater than 2 nucleotides performed similarly to the blunt-end oligonucleotide with a 2-nt truncation (Compound 162) throughout the CNS. Together, this data demonstrates the ability of truncated molecules to reduce oligodendrocyte target genes in the CNS.

### Example 28: Preparation of RNAi Oligonucleotides

### Oligonucleotide Synthesis and Purification

[1528] The oligonucleotides (RNAi oligonucleotides) described in the foregoing Examples were chemically synthesized using methods described herein. Generally, RNAi oligonucleotides were synthesized using solid phase oligonucleotide synthesis methods as described for 19-23mer RNAi oligonucleotides (see, e.g., Scaringe et al. (1990) NUCLEIC ACIDS RES. 18:5433-41 and Usman et al. (1987) J. AM. CHEM. SOC. 109:7845-45; see also, U.S. Pat. Nos. 5,804,683; 5,831,071; 5,998,203; 6,008,400; 6,111,086; 6,117,657; 6,353,098; 6,362,323; 6,437,117 and 6,469,158) in addition to using known phosphoramidite synthesis methodologies (see, e.g., Hughes and Ellington (2017) COLD SPRING HARB PERSPECT BIOL. 9(1):a023812; Beaucage S. L., Caruthers M. H. STUDIES ON NUCLEOTIDE CHEMISTRY V: Deoxynucleoside Phosphoramidites-A New Class of Key Intermediates for Deoxypolynucleotide Synthesis, TETRAHEDRON LETT. 1981; 22:1859-62. doi: 10.1016/S0040-4039(01)90461-7); PCT application No. PCT/US2021/42469 (each of which is incorporated herein by this reference)). RNAi oligonucleotides having a 19mer core sequence were formatted into constructs having a 36mer sense strand and a 22mer antisense strand to allow for processing by the RNAi machinery. The 19mer core sequence is complementary to a region in the GFAP mRNA.

[1529] Individual RNA strands were synthesized and HPLC purified according to standard methods (Integrated DNA Technologies; Coralville, IA). For example, RNA oligonucleotides were synthesized using solid phase phosphoramidite chemistry, deprotected and desalted on NAP-5 columns (Amersham Pharmacia Biotech; Piscataway, NJ) using standard techniques (Damha & Olgivie (1993) METHODS MOL. BIOL. 20:81-114; Wincott et al. (1995) NUCLEIC ACIDS RES. 23:2677-84) and the phosphoramidite synthesis as shown below:

### Synthesis of 2-(2-((((6aR,8R,9R,9aR)-8-(6-benzamido-9H-purin-9-yl)-2,2,4,4-tetraisopropyltetrahydro-6H-furo[3,2-f][1,3,5,2,4]trioxadisilocin-9-yl)oxy)methoxy)ethoxy) ethan-1-ammonium formate (1-6)

[chemical structure]

[chemical structure]

[1530] A solution of compound 1-1 (25.00 g, 67.38 mmol) in 20 mL of DMF was treated with pyridine (11 mL, 134.67 mmol) and tetraisopropyldisiloxane dichloride (22.63 mL, 70.75 mmol) at 10° C. The resulting mixture was stirred at 25° C. for 3 h and quenched with 20% citric acid (50 mL). The aqueous layer was extracted with EtOAc (3×50 mL) and the combined organic layers were concentrated in vacuo. The crude residue was recrystallized from a mixture of MTBE and n-heptane (1:15, 320 mL) to afford compound 1-2 (37.20 g, 90%) as a white oily solid.

[1531] A solution of compound 1-2 (37.00 g, 60.33 mmol) in 20 mL of DMSO was treated with AcOH (20 mL, 317.20 mmol) and Ac₂O (15 mL, 156.68 mmol). The mixture was stirred at 25° C. for 15 h. The reaction was diluted with EtOAc (100 mL) and quenched with sat. K₂CO₃ (50 mL). The aqueous layer was extracted with EtOAc (3×50 mL). The combined organic layers were concentrated and recrystallized with ACN (30 mL) to afford compound 1-3 (15.65 g, 38.4%) as a white solid.

[1532] A solution of compound 1-3 (20.00 g, 29.72 mmol) in 120 mL of DCM was treated with Fmoc-amino-ethoxy ethanol (11.67 g, 35.66 mmol) at 25° C. The mixture was stirred to afford a clear solution and then treated with 4 Å molecular sieves (20.0 g), N-iodosuccinimide (8.02 g, 35.66 mmol), and TfOH (5.25 mL, 59.44 mmol). The mixture was stirred at 30° C. until the HPLC analysis indicated >95% consumption of compound 1-3. The reaction was quenched with TEA (6 mL) and filtered. The filtrate was diluted with EtOAc, washed with sat. NaHCO₃ (2×100 mL), sat. Na₂SO₃ (2×100 mL), and water (2×100 mL) and concentrated in vacuo to afford crude compound 1-4 (26.34 g, 93.9%) as a yellow solid, which was used directly for the next step without further purification.

[1533] A solution of compound 1-4 (26.34 g, 27.62 mmol) in a mixture of DCM/water (10:7, 170 mL) was treated with DBU (7.00 mL, 45.08 mmol) at 5° C. The mixture was stirred at 5-25° C. for 1 h. The organic layer was then separated, washed with water (100 mL), and diluted with DCM (130 mL). The solution was treated with fumaric acid (7.05 g, 60.76 mmol) and 4 Å molecular sieves (26.34 g) in four portions. The mixture was stirred for 1 h, concentrated, and recrystallized from a mixture of MTBE and DCM (5:1) to afford compound 1-6 (14.74 g, 62.9%) as a white solid: ¹H NMR (400 MHZ, d₆-DMSO) 8.73 (s, 1H), 8.58 (s, 1H), 8.15-8.02 (m, 2H), 7.65-7.60 (m, 1H), 7.59-7.51 (m, 2H), 6.52 (s, 2H), 6.15 (s, 1H), 5.08-4.90 (m, 3H), 4.83-4.78 (m, 1H), 4.15-3.90 (m, 3H), 3.79-3.65 (m, 2H), 2.98-2.85 (m, 6H), 1.20-0.95 (m, 28H).

### Synthesis of (2R,3R,4R,5R)-5-(6-benzamido-9H-purin-9-yl)-2-((bis(4-methoxyphenyl)(phenyl)methoxy)methyl)-4-((2-(2-[lipid]-amidoethoxy)ethoxy)methoxy) tetrahydrofuran-3-yl (2-cyanoethyl) diisopropylphosphoramidite (2-4a to 2-4e)

[chemical structure]

[chemical structure]

[1534] A solution of compound 1-6 (50.00 g, 59.01 mmol) in 150 mL of 2-methyltetrahydrofuran was washed with ice cold aqueous K₂HPO₄ (6%, 100 mL) and brine (20%, 2×100 mL). The organic layer was separated and treated with hexanoic acid (10.33 mL, 82.61 mmol), HATU (33.66 g, 88.52 mmol), and DMAP (10.81 g, 147.52 mmol) at 0° C. The resulting mixture was warmed to 25° C. and stirred for 1 h. The solution was washed with water (2×100 mL), brine (100 mL), and concentrated in vacuo to afford a crude residue. Flash chromatography on silica gel (1:1 hexanes/acetone) gave compound 2-1a (34.95 g, 71.5%) as a white solid.

[1535] A mixture of compound 2-1a (34.95 g, 42.19 mmol) and TEA (9.28 mL, 126.58 mmol) in 80 mL of THF was treated with triethylamine trihydrofluoride (20.61 mL, 126.58 mmol) dropwise at 10° C. The mixture was warmed to 25° C. and stirred for 2 h. The reaction was concentrated, dissolved in DCM (100 mL), and washed with sat. NaHCO₃ (5×20 mL) and brine (50 mL). The organic layer was concentrated in vacuo to afford crude compound 2-2a (24.72 g, 99%), which was used directly for the next step without further purification.

[1536] A solution of compound 2-2a (24.72 g, 42.18 mmol) in 50 mL of DCM was treated with N-methylmorpholine (18.54 mL, 168.67 mmol) and DMTr-Cl (15.69 g, 46.38 mmol). The mixture was stirred at 25° C. for 2 h and quenched with sat. NaHCO₃ (50 mL). The organic layer was separated, washed with water, concentrated to afford a slurry crude. Flash chromatography on silica gel (1:1 hexanes/acetone) gave compound 2-3a (30.05 g, 33.8 mmol, 79.9%) as a white solid.

[1537] A solution of compound 2-3a (25.00 g, 28.17 mmol) in 50 mL of DCM was treated with N-methylmorpholine (3.10 mL, 28.17 mmol) and tetrazole (0.67 mL, 14.09 mmol) under nitrogen atmosphere. Bis(diisopropylamino) chlorophosphine (9.02 g, 33.80 mmol) was added to the solution dropwise and the resulting mixture was stirred at 25° C. for 4 h. The reaction was quenched with water (15 mL), and the aqueous layer was extracted with DCM (3×50 mL). The combined organic layers were washed with sat. NaHCO₃ (50 mL), concentrated to afford a crude solid that was recrystallized from a mixture of DCM/MTBE/n-hexane (1:4:40) to afford compound 2-4a (25.52 g, 83.4%) as a white solid: ¹H NMR (400 MHz, d₆-DMSO) 11.25 (s, 1H), 8.65-8.60 (m, 2H), 8.09-8.02 (m, 2H), 7.71 (s, 1H), 7.67-7.60 (m, 1H), 7.59-7.51 (m, 2H), 7.38-7.34 (m, 2H), 7.30-7.25 (m, 7H), 6.85-6.79 (m, 4H), 6.23-6.20 (m, 1H), 5.23-5.14 (m, 1H), 4.80-4.69 (m, 3H), 4.33-4.23 (m, 2H), 3.90-3.78 (m, 1H), 3.75 (s, 6H), 3.74-3.52 (m, 3H), 3.50-3.20 (m, 6H), 3.14-3.09 (m, 2H), 3.09 (s, 1H), 2.82-2.80 (m, 1H), 2.65-2.60 (m, 1H), 2.05-1.96 (m, 2H), 1.50-1.39 (m, 2H), 1.31-1.10 (m, 14H), 1.08-1.05 (m, 2H), 0.85-0.79 (m, 3H); ³¹P NMR (162 MHz, d₆-DMSO) 149.43, 149.18.

[1538] Compound 2-4b, 2-4c, 2-4d, and 2-4e were prepared using similar procedures described above for compound 2-4a. Compound 2-4b was obtained (25.50 g, 85.4%) as a white solid: ¹H NMR (400 MHZ, d₆-DMSO) 11.23 (s, 1H), 8.65-8.60 (m, 2H), 8.05-8.02 (m, 2H), 7.73-7.70 (m, 1H), 7.67-7.60 (m, 1H), 7.59-7.51 (m, 2H), 7.38-7.34 (m, 2H), 7.30-7.25 (m, 7H), 6.89-6.80 (m, 4H), 6.21-6.15 (m, 1H), 5.23-5.17 (m, 1H), 4.80-4.69 (m, 3H), 4.40-4.21 (m, 2H), 3.91-3.80 (m, 1H), 3.74 (s, 6H), 3.74-3.52 (m, 3H), 3.50-3.20 (m, 6H), 3.14-3.09 (m, 2H), 3.09 (s, 1H), 2.83-2.79 (m, 1H), 2.68-2.62 (m, 1H), 2.05-1.97 (m, 2H), 1.50-1.38 (m, 2H), 1.31-1.10 (m, 18H), 1.08-1.05 (m, 2H), 0.85-0.78 (m, 3H); ³¹P NMR (162 MHz, d₆-DMSO) 149.43, 149.19.

[1539] Compound 2-4c was obtained (36.60 g, 66.3%) as an off-white solid: ¹H NMR (400 MHz, d₆-DMSO) 11.22 (s, 1H), 8.64-8.59 (m, 2H), 8.05-8.00 (m, 2H), 7.73-7.70 (m, 1H), 7.67-7.60 (m, 1H), 7.59-7.51 (m, 2H), 7.38-7.34 (m, 2H), 7.30-7.25 (m, 7H), 6.89-6.80 (m, 4H), 6.21-6.15 (m, 1H), 5.25-5.17 (m, 1H), 4.80-4.69 (m, 3H), 4.40-4.21 (m, 2H), 3.91-3.80 (m, 1H), 3.74 (s, 6H), 3.74-3.50 (m, 3H), 3.50-3.20 (m, 6H), 3.14-3.09 (m, 2H), 3.09 (s, 1H), 2.83-2.79 (m, 1H), 2.68-2.62 (m, 1H), 2.05-1.99 (m, 2H), 1.50-1.38 (m, 2H), 1.33-1.12 (m, 38H), 1.08-1.05 (m, 2H), 0.86-0.80 (m, 3H); ³¹P NMR (162 MHZ, d₆-DMSO) 149.42, 149.17.

[1540] Compound 2-4d was obtained (26.60 g, 72.9%) as an off-white solid: ¹H NMR (400 MHz, d₆-DMSO) 11.22 (s, 1H), 8.64-8.59 (m, 2H), 8.05-8.00 (m, 2H), 7.73-7.70 (m, 1H), 7.67-7.60 (m, 1H), 7.59-7.51 (m, 2H), 7.38-7.33 (m, 2H), 7.30-7.25 (m, 7H), 6.89-6.80 (m, 4H), 6.21-6.15 (m, 1H), 5.22-5.17 (m, 1H), 4.80-4.69 (m, 3H), 4.40-4.21 (m, 2H), 3.91-3.80 (m, 1H), 3.74 (s, 6H), 3.74-3.52 (m, 3H), 3.50-3.20 (m, 6H), 3.14-3.09 (m, 2H), 3.09 (s, 1H), 2.83-2.79 (m, 1H), 2.68-2.62 (m, 1H), 2.05-1.99 (m, 2H), 1.50-1.38 (m, 2H), 1.35-1.08 (m, 38H), 1.08-1.05 (m, 2H), 0.85-0.79 (m, 3H); ³¹P NMR (162 MHz, d₆-DMSO) 149.47, 149.22.

[1541] Compound 2-4e was obtained (38.10 g, 54.0%) as a white solid: ¹H NMR (400 MHZ, d₆-DMSO) 11.21 (s, 1H), 8.64-8.59 (m, 2H), 8.05-8.00 (m, 2H), 7.73-7.70 (m, 1H), 7.67-7.60 (m, 1H), 7.59-7.51 (m, 2H), 7.38-7.34 (m, 2H), 7.30-7.25 (m, 7H), 6.89-6.80 (m, 4H), 6.21-6.15 (m, 1H), 5.23-5.17 (m, 1H), 4.80-4.69 (m, 3H), 4.40-4.21 (m, 2H), 3.91-3.80 (m, 1H), 3.73 (s, 6H), 3.74-3.52 (m, 3H), 3.47-3.22 (m, 6H), 3.14-3.09 (m, 2H), 3.09 (s, 1H), 2.83-2.79 (m, 1H), 2.68-2.62 (m, 1H), 2.05-1.99 (m, 2H), 1.50-1.38 (m, 2H), 1.35-1.06 (m, 46H), 1.08-1.06 (m, 2H), 0.85-0.77 (m, 3H); ³¹P NMR (162 MHz, d₆-DMSO) 149.41, 149.15.

[1542] The oligomers were purified using ion-exchange high performance liquid chromatography (IE-HPLC) on an Amersham Source 15Q column (1.0 cm×25 cm; Amersham Pharmacia Biotech) using a 15 min step-linear gradient. The gradient varied from 90:10 Buffers A:B to 52:48 Buffers A:B, where Buffer A is 100 mM Tris pH 8.5 and Buffer B is 100 mM Tris pH 8.5, 1 M NaCl. Samples were monitored at 260 nm and peaks corresponding to the full-length oligonucleotide species were collected, pooled, desalted on NAP-5 columns, and lyophilized.

[1543] The purity of each oligomer was determined by capillary electrophoresis (CE) on a Beckman PACE 5000 (Beckman Coulter, Inc.; Fullerton, CA). The CE capillaries have a 100 μm inner diameter and contain ssDNA 100R Gel (Beckman-Coulter). Typically, about 0.6 nmole of oligonucleotide was injected into a capillary, run in an electric field of 444 V/cm, and was detected by UV absorbance at 260 nm. Denaturing Tris-Borate-7 M-urea running buffer was purchased from Beckman-Coulter. Oligoribonucleotides were obtained that were at least 90% pure as assessed by CE for use in experiments described below. Compound identity was verified by matrix-assisted laser desorption ionization time-of-flight (MALDI-TOF) mass spectroscopy on a Voyager DE™ Biospectometry Work Station (Applied Biosystems; Foster City, CA) following the manufacturer's recommended protocol. Relative molecular masses of all oligomers were obtained, often within 0.2% of expected molecular mass.

### Preparation of Duplexes

[1544] Single strand RNA oligomers were resuspended (e.g., at 100 μM concentration) in duplex buffer consisting of 100 mM potassium acetate, 30 mM HEPES, pH 7.5. Complementary sense and antisense strands were mixed in equal molar amounts to yield a final solution of, for example, 50 μM duplex. Samples were heated to 100° C. for 5′ in RNA buffer (IDT) and were allowed to cool to room temperature before use. The RNAi oligonucleotides were stored at −20° C. Single strand RNA oligomers were stored lyophilized or in nuclease-free water at −80° C.

[1545] The synthesis methods described herein are used to generate the lipid-conjugated oligonucleotides described in Examples 31, 32, 34, and 35.

### Example 29: GalNAc-Conjugated GFAP RNAi Oligonucleotides Inhibit Mouse Gfap In Vivo in a Concentration Dependent Manner Via Intrathecal and Intracerebroventricular Administration

[1546] Glial fibrillary acidic protein (GFAP) encodes intermediate filament proteins primarily found in astrocytes of the CNS. Sufficient knockdown of GFAP indicates ability of oligonucleotides described herein to reduce expression of target genes expressed in astrocytes. To evaluate the ability of RNAi oligonucleotides to reduce Gfap expression in vivo, oligonucleotides synthesized as described in Example 28 were used to generate double-stranded RNAi oligonucleotides comprising a nicked tetraloop GalNAc-conjugated structure (referred to herein as “GalNAc-conjugated GFAP oligonucleotides” or “GalNAc-GFAP oligonucleotides”) having a 36-mer passenger strand and a 22-mer guide strand. Further, the nucleotide sequences comprising the passenger strand and guide strand have a distinct pattern of modified nucleotides and phosphorothioate linkages. Three of the nucleotides comprising the tetraloop were each conjugated to a GalNAc moiety (CAS #14131-60-3). The modification pattern of each strand is illustrated below:

Sense Strand:
5′[mXs][mX][mX][mX][X][mX][mX][fX][fX][fX][fX][mX]
mX][mX][mX][mX][mX][mX][mX][mX][X][mX][mX][mX][X]
[mX][mX][ademX-GalNAc][ademX-GalNAc][ademX-
GalNAc][mX][mX][mX][mX][mX][mX]3′

### Hybridized to:

Antisense Strand:
5′ [MePhosphonate-4O-mXs][fXs][fXs][fX][fX][mX]
[fX][mX][mX][fX][mX][mX][mX][fX][X][mX][mX][X][mX]
[mXs][mXs][mX] 3′

TABLE 28
Modification key:

| Symbol | Modification/linkage |
|---|---|
| [MePhosphonate- | 4′-O-monomethylphosphonate-2′-O-methyl |
| 4O-mX] | modified nucleotide |
| [ademX-GalNAc] | GalNAc attached to a nucleotide |
| [mXs] | 2′-O-methyl modified nucleotide with a |
| | phosphorothioate linkage to the |
| | neighboring nucleotide |
| [fXs] | 2′-fluoro modified nucleotide with a |
| | phosphorothioate linkage to the |
| | neighboring nucleotide |
| [mX] | 2′-O-methyl modified nucleotide with |
| | phosphodiester linkages to |
| | neighboring nucleotides |
| [fX] | 2′-fluoro modified nucleotide with |
| | phosphodiester linkages to |
| | neighboring nucleotides |
| [AdemX-C16] | C16 lipid attached to anucleotide |
| [AdemX-C16s] | C16 lipid attached to a nucleotide |
| | with a phosphorothioate linkage |
| | to the neighboring nucleotide |

i. Intrathecal Administration

[1547] GFAP-1477, as shown in Table 29, was assessed for the ability to reduce murine Gfap in the central nervous system (CNS) via intrathecal (i.t.) administration. Specifically, mice were administered 10, 32, 100, 320, or 1000 μg of GFAP-1477 formulated in artificial cerebrospinal fluid (aCSF) via i.t. lumbar injections. Animals were sacrificed 7 days following intrathecal injection. RNA was extracted from CNS tissue to determine murine Gfap mRNA levels by qPCR (normalized to endogenous housekeeping gene Rpl23). The levels of murine Gfap mRNA were determined using PrimeTime™ qPCR Probe Assays (IDT), which consisted of a primer pair and fluorescently labeled 5′ nuclease probe specific to murine Gfap mRNA. The percentage of murine Gfap mRNA remaining in the samples from treated mice was determined using the 2^{-ΔΔCt} (“delta-delta Ct”) method (Livak and Schmittgen (2001) METHODS 25:402-408). Reduction of Gfap expression was observed in a dose dependent manner across tissues of the CNS. Specifically, Gfap expression was reduced by about 50% or greater in samples from the cervical spinal cord, thoracic spinal cord, lumbar spinal cord, and cerebellum as shown in FIGS. 49A, 49B, 49C, and 49F, respectively. Less reduction of Gfap expression was observed in the frontal cortex and hippocampus as shown in FIGS. 49D and 49E, respectively. The average percent (%) of mRNA remaining is shown in FIG. 50, along with the ED₅₀ values determined for each region of the brain based on the percent mRNA remaining in the tissue at each concentration of oligonucleotide. Together, this data demonstrates GFAP targeting oligonucleotides having a GalNAc-conjugated tetraloop inhibit GFAP expression following i.t. administration in a dose-dependent manner in several tissues of the CNS.

TABLE 29
GalNAc-Conjugated mouse Gfap RNAi Oligonucleotide

| | Unmodified | Unmodified | Modified | Modified |
|---|---|---|---|---|
| | Sense | Antisense | Sense | Antisense |
| | Strand | strand | Strand | strand |
| GFAP-1147 | 756 | 757 | 758 | 771 |

ii. Intracerebroventricular Administration

[1548] GFAP-1477 was also assessed for the ability to reduce murine Gfap in the central nervous system (CNS) via intracerebroventricular (i.c.v) administration. Specifically, mice were administered 10, 32, 100, or 300 μg of GFAP-1477 formulated in aCSF via i.c.v. Animals were sacrificed 7 days following i.c.v. injection. RNA was extracted from CNS tissue as described above. Reduction of Gfap expression was observed in a dose-dependent manner across tissues of the CNS. Specifically, Gfap expression was reduced by about 50% or greater in samples of the frontal cortex, brain stem, hippocampus, and lumbar spinal cord as shown in FIGS. 51A-51D, respectively. The average percent (%) of mRNA remaining is shown in FIG. 52, along with the ED₅₀ values determined for each region of the brain based on the percent mRNA remaining in the tissue at each concentration of oligonucleotide. Together, this data demonstrates GFAP targeting oligonucleotides having a GalNAc-conjugated tetraloop inhibit GFAP expression in several tissues of the CNS via i.c.v administration in a dose-dependent manner.

### Example 30: Synthesis of Tetraloop RNAi Oligonucleotide-Lipid Conjugates

[1549] Lipid-conjugated tetraloop oligonucleotides described herein can be synthesized using post-synthetic methods described in detail in PCT application No. PCT/US2021/42469. Specifically, the oligonucleotides can be synthesized using a post-synthetic conjugation approach such as that depicted below.

[chemical structure]

[1550] R₁COOH group represents fatty acid C8:0, C10:0, C11:0, C12:0, C14:0, C16:0, C17:0, C18:0, C18:1, C18:2, C22:5, C22:0, C24:0, C26:0, C22:6, C24:1, diacyl C16:0 or diacyl C18:1. Exemplary R₁ structures are provided below:

[chemical structure]

[1551] Synthesis Sense 1 and Antisense 1 were prepared by solid-phase synthesis. Synthesis of Conjugated Sense 1a-1i.

[1552] Conjugated Sense 1a was synthesized through post-syntenic conjugation approach. In Eppendorf tube 1, a solution of octanoic acid (0.58 mg, 4 umol) in DMA (0.75 mL) was treated with HATU (1.52 mg, 4 umol) at rt. In Eppendorf tube 2, a solution of oligo Sense 1 (10.00 mg, 0.8 umol) in H₂O (0.25 mL) was treated with DIPEA (1.39 uL, 8 umol). The solution in Eppendorf tube 1 was added to the Eppendorf tube 2 and mixed using ThermoMixer at rt. After the reaction was completed indicated by LC-MS analysis, the reaction mixture was diluted with 5 mL of water and purified by revers phase XBridge C18 column using a 5-95% gradient of 100 mM TEAA in ACN and H₂O. The product fractions were concentrated under reduced pressure using Genevac. The combined residual solvent was dialyzed against water (1×), saline (1×), and water (3×) using Amicon® Ultra-15 Centrifugal (3K). The Amicon membrane was washed with water (3×2 mL) and the combined solvents were then lyophilized to afford an amorphous white solid of Conjugated Sense 1a (6.43 mg, 64% yield).

[1553] Conjugated Sense 1b-1i were prepared using similar procedures as described for the synthesis of Conjugated Sense 1a and obtained in 42%-69% yields.

Annealing of Duplex 1a-1j.

[1554] Conjugated Sense 1a (10 mg, measured by weight) was dissolved in 0.5 mL deionized water to prepare a 20 mg/mL solution. Antisense 1 (10 mg, measured by OD) was dissolved in 0.5 mL deionized water to prepare a 20 mg/mL solution, which was used for the titration of the conjugated sense and quantification of the duplex amount. Based on the calculation of molar amounts of both conjugated sense and antisense, a proportion of required Antisense 1 was added to the Conjugated Sense 1a solution. The resulting mixture was stirred at 95° C. for 5 min and allowed to cool down to rt. The annealing progress was monitored by ion-exchange HPLC. Based on the annealing progress, several proportions of Antisense 1 were further added to complete the annealing with >95% purity. The solution was lyophilized to afford Duplex 1a (C8) and its amount was calculated based on the molar amount of the antisense consumed in the annealing.

[1555] Duplex 1b-1i were prepared using the same procedures as described for the annealing of Duplex 1a (C8).

[1556] The following Scheme 1-2 depicts the synthesis of Nicked tetraloop GalXC conjugates with mono-lipid on the loop. Post-synthetic conjugation was realized through Cu-catalyzed alkyne-azide cycloaddition reaction.

[chemical structure]

[1557] Sense 1B and Antisense 1B were prepared by solid-phase synthesis.

### Synthesis of Conjugated Sense 1j.

[1558] In Eppendorf tube 1, a solution of oligo (10.00 mg, 0.8 umol) in a 3:1 mixture of DMA/H₂O (0.5 mL) was treated with the lipid linker azide (11.26 mg, 4 umol). In Eppendorf tube 2, CuBr dimethyl sulfide (1.64 mg, 8 umol) was dissolved in ACN (0.5 mL). Both solutions were degassed for 10 min by bubbling N₂ through them. The ACN solution of CuBrSMe₂ was then added into tube 1 and the resulting mixture was stirred at 40° C. After the reaction was completed indicated by LC-MS analysis, the reaction mixture was diluted with 0.5 M EDTA (2 mL) and dialyzed against water (2×) using a Amicon® Ultra-15 Centrifugal (3K). The reaction crude was purified by revers phase XBridge C18 column using a 5-95% gradient of 100 mM TEAA in ACN (with 30% IPA spiked in) and H₂O. The product fractions were concentrated under reduced pressure using Genevac. The combined residual solvent was dialyzed against water (1×), saline (1×), and water (3×) using Amicon® Ultra-15 Centrifugal (3K). The Amicon membrane was washed with water (3×2 mL) and the combined solvents were lyophilized to afford an amorphous white solid of Conjugated Sense 1j (6.90 mg, 57% yield).

[1559] Duplex 1j (PEG2K-diacyl C18) was prepared using the same procedures as described for the annealing of Duplex 1a (C8).

[1560] The following Scheme 1-3 depicts the synthesis of Nicked tetraloop GalXC conjugates with di-lipid on the loop using post-synthetic conjugation approach.

[chemical structure]

[chemical structure]

[1561] Sense 2 and Antisense 2 were prepared by solid-phase synthesis.

[1562] Conjugated Sense 2a and 2b were prepared using similar procedures as described for the synthesis of Conjugated Sense 1a but with 10 eq of lipid, 10 eq of HATU, and 20 eq of DIPEA.

[1563] Duplex 2a (2XC11) and 2b (2XC22) were prepared using the same procedures as described for the annealing of Duplex 1a (C8).

[1564] The following Scheme 1-4 depicts the synthesis of GalXC of fully phosphorothioated stem-loop conjugated with mono-lipid using post-synthetic conjugation approach.

[chemical structure]

[1565] Sense 3 and Antisense 3 were prepared by solid-phase synthesis.

[1566] Conjugated Sense 3a was prepared using similar procedures as described for the synthesis of Conjugated Sense 1a and obtained in a 65% yield.

[1567] Duplex 3a (PS—C22) was prepared using the same procedures as described for the annealing of Duplex 1a (C8).

[1568] The following Scheme 1-5 depicts the synthesis of GalXC of short sense conjugated with mono-lipid using post-synthetic conjugation approach.

[chemical structure]

[1569] Sense 4 and Antisense 4 were prepared by solid-phase synthesis.

[1570] Conjugated Sense 4a was prepared using similar procedures as described for the synthesis of Conjugated Sense 1a and obtained in a 74% yield.

[1571] Duplex 4a (SS—C22) was prepared using the same procedures as described for the annealing of Duplex 1a (C8).

[1572] The following scheme 1-6 depicts an example of solid phase synthesis of Nicked tetraloop GalXC conjugated with lipid(s) on the loop.

[chemical structure]

### Synthesis of Conjugated Sense 6.

[1573] Conjugated Sense 6 was prepared by solid-phase synthesis using a commercial oligo synthesizer. The oligonucleotides were synthesized using 2′-modified nucleoside phosphoramidites, such as 2′-F or 2′-OMe, and 2′-diethoxymethanol linked fatty acid amide nucleoside phosphoramidites. Oligonucleotide synthesis was conducted on a solid support in the 3′ to 5′ direction using a standard oligonucleotide synthesis protocol. 5-ethylthio-1H-tetrazole (ETT) was used as an activator for the coupling reaction. Iodine solution was used for phosphite triester oxidation. 3-(Dimethylaminomethylidene)amino-3H-1,2,4-dithiazole-3-thione (DDTT) was used for the formation of phosphorothioate linkages. Synthesized oligonucleotides were treated with concentrated aqueous ammonium for 10 h. The ammonia was removed from the suspension and the solid support residues were removed by filtration. The crude oligonucleotide was treated with TEAA, analyzed, and purified by strong anion exchange high performance liquid chromatography (SAX-HPLC). The fractions were combined and dialyzed against water (3×), saline (1×), and water (3×) using Amicon® Ultra-15 Centrifugal (3K). The remaining solvent was then lyophilized to afford the desired Conjugated Sense 6.

[1574] Duplex 6 was prepared using the same procedures as described for the annealing of Duplex 1a (C8).

[1575] The following Scheme 1-7 depicts the synthesis of GalXC conjugated with mono-lipid at 5′-end using post-synthetic conjugation approach.

[chemical structure]

### Synthesis of Conjugated Sense 10a

[1576] Conjugated Sense 10a was obtained using the same method or a substantially similar method to the synthesis of Conjugated Sense 5.

Synthesis example of Duplex 10a

[1577] Duplex 10a was obtained using the same method or a substantially similar method to the synthesis of Duplex 5.

### Example 31: GFAP-Targeting Oligonucleotides Demonstrate Long-Term Duration of Action Via Intrathecal and Intracisterna Magna Administration

[1578] In this example, duration of action was determined using oligonucleotides with different targeting ligands. Specifically, a GalNAc-conjugated Gfap oligonucleotide as described in Example 29, and a C16-conjugated Gfap oligonucleotide generated by methods described in Example 28, the sequences of which are provided in Table 30 were administered to rats for long term-studies. A C16 lipid moiety was conjugated at position 28 of the sense strand.

### Tetraloop RNAi Oligonucleotide Modification Pattern:

Sense Strand:
5′[mXs][mX][mX][mX][mX][mX][mX][fX][fX][fX][fX]
[mX][X][mX][mX][mX][mX][mX][mX][mX][mX][mX][mX]
[mX][mX][mX][mX][ademX-C16][mX][mX][mX][mX][mX]
[mX][mX][mX]3′

### Hybridized to:

Antisense Strand:
5′[MePhosphonate-4O-mXs][fXs][fXs][fX][fX][mX]
[fX][mX][mX][fX][mX][mX][mX][fX][mX][mX][mX][mX]
[mX][mXs][mXs][mX]3′

### Modification key: Table 28

i. Intrathecal Administration

[1579] The GalNAc-conjugated and lipid-conjugated Gfap oligonucleotides described above were administered to rats via intrathecal (i.t.) injection to assess long-term duration of reduction of Gfap expression. Specifically, Sprague-Dawley rats (250 g) were administered a single 1000 μg dose of an oligonucleotide in Table 30 formulated in aCSF vis i.t. injection. Target knock-down was assessed 8, 12, and 23 weeks after i.t. injection. RNA was extracted from tissue samples of the prefrontal cortex, somatosensory cortex, striatum, hippocampus, periaqueductal grey, cerebellum, brain stem, and spinal cord (SC) segments 1-8 (SC1-SC8) to determine rat Gfap mRNA levels by qPCR as described in Example 29. The levels of murine Gfap mRNA were determined using PrimeTime™ qPCR Probe Assays (IDT), The C16-conjugated oligonucleotide demonstrated about 50% or greater reduction of Gfap expression in the brainstem and SC1-SC8 over the course of the study (i.e., at 8, 12, and 23 weeks) (FIG. 53A). In contrast, less reduction of Gfap expression was observed using the GalNAc-conjugated oligonucleotide across all sampled brain tissues (FIG. 53B). This data demonstrates the long-term sustained inhibition of astrocyte target mRNA (e.g., GFAP) in the central nervous system following a single intrathecal injection.

TABLE 30
Tetraloop-conjugated RNAi Oligonucleotides

| | | Un- | Un- | | |
|---|---|---|---|---|---|
| | | modified | modified | Modified | Modified |
| | Ligand | Sense | Antisense | Sense | Antisense |
| | Conjugate | Strand | strand | Strand | strand |
| GFAP-1147 | GalNAc | 756 | 757 | 758 | 771 |
| GFAP-1147 | C16 lipid | 756 | 757 | 768 | 771 |

ii. Intracisterna Magna Administration

[1580] The C16-conjugated GFAP oligonucleotide described in Table 30 was administered to rats intracisterna magna (i.c.m.) injection to assess long-term duration of reduction of Gfap expression. Specifically, Sprague-Dawley rats were administered a single 1000 μg dose of oligonucleotide formulated in aCSF via i.c.m injection. Gfap expression was assessed 4 and 12 weeks after injection. RNA was extracted from tissue samples of the prefrontal cortex, somatosensory cortex, hippocampus, hypothalamus, cerebellum, brain stem, cervical spinal cord, and lumbar spinal cord to determine rat Gfap mRNA levels by qPCR as described in Example 29. About 50% or greater reduction in Gfap expression was observed in in all brain regions at 4-weeks following i.c.m. injection, whereas about 50% or greater reduction in Gfap expression was maintained in the cerebellum, brainstem, cervical spinal cord, and lumbar spinal cord out to 12 weeks following i.c.m. injection (FIG. 54).

[1581] A second cohort of animals were administered the same C16 lipid-conjugated Gfap oligonucleotide in Table 30 to assess the reduction of Gfap mRNA expression out to 26 and 39 weeks. Rats were administered a single dose of the oligonucleotide as described above. RNA was extracted from tissue samples of the frontal cortex, striatum, somatosensory cortex, hippocampus, hypothalamus, periaqueductal grey, cerebellum, brain stem, and spinal cord (SC) segments 1-8 (SC1-SC8) to determine rat Gfap mRNA levels by qPCR as described in Example 29. About 50% or greater reduction of Gfap expression was observed at 26-weeks post dose in the cerebellum, brainstem, and SC1-SC5 (FIG. 55A). Out to 39 weeks, about 25-50% reduction of Gfap expression was observed in the cerebellum, brainstem, and SC1-SC7 (FIG. 55B). This data demonstrates the long-term sustained inhibition of astrocyte target mRNA (e.g., GFAP) in the central nervous system following a single intracisterna magna injection.

### Example 32: Positional Effects of Lipid Conjugation on the In Vivo Activity of Tetraloop RNAi Oligonucleotide Lipid-Conjugates to the Central Nervous System

[1582] The ability of RNAi oligonucleotide-lipid conjugates comprising a tetraloop to reduce mRNA expression in astrocytes of the CNS was evaluated in vivo. C16-conjugated Gfap oligonucleotides were generated as described in Example 28. Specifically, a C16 lipid was conjugated at one of positions (P) 1, 4, 8, 12, 13, 18, 20, 23, 28, 29, and 30 in the sense strand as shown in the modification patterns below. The unmodified sense and antisense strands are provided in SEQ ID NOs: 756 and 757, respectively, and the modified strands are shown in Table 31.

### Tetraloop RNAi Oligonucleotide Modification Patterns:

P1 Sense Strand:
[ademXs-C16][mX][mX][mX][mX][mX][mX][mX][mX][mX][mX][mX][mX][mX][mX][mX]
[mX][mX][mX][mX][mX][mX][mX][mX][mX][mX][mX][mX][mX][mX][mX][mX][mX][mX]
[mX][mX]
P4 Sense Strand:
[mXs][mX][mX][ademX-C16][mX][mX][mX][fX][fX][fX][fX][mX][mX][mX][mX][mX]
[mX][mX][mX][mX][mX][mX][mX][mX][mX][mX][mX][mX][mX][mX][mX][mX][mX]
[mX][mX][mX]
P8 Sense Strand:
[mXs][mX][mX][mX][mX][mX][mX][ademX-C16][fX][fX][fX][mX][mX][mX][mX]
[mX][mX][mX][mX][mX][mX][mX][mX][mX][mX][mX][mX][mX][mX][mX][mX][mX]
[mX][mX][mX][mX]
P12 Sense Strand:
[mXs][mX][mX][mX][mX][mX][mX][fX][fX][fX][fX][ademX-C16][mX][mX][mX][mX]
[mX][mX][mX][mX][mX][mX][mX][mX][mX][mX][mX][mX][mX][mX][mX][mX][mX]
[mX][mX][mX]
P13 Sense Strand:
[mXs][mX][mX][mX][mX][mX][mX][fX][fX][fX][fX][mX][ademX-C16][mX][mX][mX]
[mX][mX][mX][mX][mX][mX][mX][mX][mX][mX][mX][mX][mX][mX][mX][mX][mX]
[mX][mX][mX]
P18 Sense Strand:
[mXs][mX][mX][mX][mX][mX][mX][fX][fX][fX][fX][mX][mX][mX][mX][mX][mX]
[ademX-C16][mX][mX][mX][mX][mX][mX][mX][mX][mX][mX][mX][mX][mX][mX][mX]
[mX][mX][mX]
P20 Sense Strand:
[mXs][mX][mX][mX][mX][mX][mX][fX][fX][fX][fX][mX][mX][mX][mX][mX][mX][mX]
[mX][ademX-C16][mX][mX][mX][mX][mX][mX][mX][mX][mX][mX][mX][mX][mX][mX]
[mX][mX]
P23 Sense Strand:
[mXs][mX][mX][mX][mX][mX][mX][fX][fX][fX][fX][mX][mX][mX][mX][mX][mX][mX]
[mX][mX][mX][mX][ademX-
C16][mX][mX][mX][mX][mX][mX][mX][mX][mX][mX][mX][mX][mX]
P28 Sense Strand:
[mXs][mX][mX][mX][mX][mX][mX][fX][fX][fX][fX][mX][mX][mX][mX][mX][mX][mX]
[mX][mX][mX][mX][mX][mX][mX][mX][mX][ademA-
C16][mX][mX][mX][mX][mX][mX][mX][mX]
P29 Sense Strand:
[mXs][mX][mX][mX][mX][mX][mX][fX][fX][fX][fX][mX][mX][mX][mX][mX][mX][mX]
[mX][mX][mX][mX][mX][mX][mX][mX][mX][mX][ademX-C16][mX][mX][mX][mX]
[mX][mX][mX]
P30 Sense Strand:
[mXs][mX][mX][mX][mX][mX][mX][fX][fX][fX][fX][mX][mX][mX][mX][mX][mX][mX]
[mX][mX][mX][mX][mX][mX][mX][mX][mX][mX][mX][ademX-C16][mX][mX][mX]
[mX][mX][mX]

[1583] Each of P1, P4, P8, P12, P13, P18, P20, P23, P28, P29, and P30 hybridized to an antisense strand having the following modification pattern:

Antisense Strand:
[MePhosphonate-4O-mXs][fXs][fXs][fX][fX][mX][fX]
[mX][mX][fX][mX][mX][mX][fX][mX][mX][mX][mX][mX]
[mXs][mXs][mX]

### Modification Key: Table 28

TABLE 31
Tetraloop RNAi oligonucleotide lipid-conjugates

| | | Antisense |
|---|---|---|
| | Sense Strand | Strand |
| Oligonucleotide | SEQ ID NO | SEQ ID NO |
| Tetraloop P1 C16 | 759 | 771 |
| Tetraloop P4 C16 | 760 | 771 |
| Tetraloop P8 C16 | 761 | 771 |
| Tetraloop P12 C16 | 762 | 771 |
| Tetraloop P13 C16 | 763 | 771 |
| Tetraloop P18 C16 | 764 | 771 |
| Tetraloop P20 C16 | 766 | 771 |
| Tetraloop P23 C16 | 767 | 771 |
| Tetraloop P28 C16 | 768 | 771 |
| Tetraloop P29 C16 | 769 | 771 |
| Tetraloop P30 C16 | 770 | 771 |

[1584] To evaluate the oligonucleotides in Table 31, C57BL/6 female mice, 6-8 weeks old, were treated with 300 μg of RNAi oligonucleotide formulated in artificial cerebrospinal fluid via intrathecal (i.t.) lumbar injection. Target expression was assessed 7 days after injection.

[1585] RNA was extracted from tissue samples from the lumbar spinal cord, medulla, cerebellum, hypothalamus, hippocampus, and frontal cortex to determine murine Gfap mRNA levels by qPCR as described in Example 29. Gfap mRNA expression was reduced in the lumbar spinal cord for all oligonucleotides (FIG. 56A). mRNA expression was reduced in the medulla for oligonucleotides with a C16 lipid conjugated at P1, P4, P13, P18, P20, P23, P29, or P30 (FIG. 56B). In the cerebellum, expression was reduced by oligonucleotides with a C16 lipid conjugated at P4, P23, or P29 (FIG. 56C). Gfap mRNA expression was reduced in the hypothalamus for oligonucleotides with a C16 lipid conjugated at P1, P4, P12, P13, P18, P20, P23, P28, P29, or P30 (FIG. 56D). Minimal knock-down was observed in the hippocampus and frontal cortex (FIGS. 56E and 56F, respectively). Overall, C16-conjugated tetraloop oligonucleotides reduced Gfap expression throughout several CNS tissues following administration to the CNS via i.t. lumbar injection.

### Example 33: Synthesis of Lipid-Conjugated Blunt-End Oligonucleotides

[1586] The following schematic depicts the synthesis of a blunt end oligonucleotide with a C16-lipid at the 5′-end. Lipid-conjugated blunt-ended oligonucleotides described herein can be synthesized using post-synthetic methods described in detail in PCT application No. PCT/US2021/42469. Specifically, the oligonucleotides can be synthesized using a post-synthetic conjugation approach such as that depicted below. In Eppendorf tube 1, a solution of palmitic acid in DMA was treated with HATU at rt. In Eppendorf tube 2, a solution of oligo sense strand in H₂O was treated with DIPEA. The solution in Eppendorf tube 1 was added to the Eppendorf tube 2 and mixed using ThermoMixer at rt. After the reaction was completed indicated by LC-MS analysis, the reaction mixture was diluted with 5 mL of water and purified by reverse phase XBridge C18 column using a 5-95% gradient of 100 mM TEAA in ACN and H₂O. The product fractions were concentrated under reduced pressure using Genevac. The combined residual solvent was dialyzed against water (1×), saline (1×), and water (3×) using Amicon® Ultra-15 Centrifugal (3K). The Amicon membrane was washed with water (3×2 mL) and the combined solvents were then lyophilized to afford an amorphous white solid.

[chemical structure]

### Example 34: Positional Effects of Lipid Conjugation on the In Vivo Activity of Blunt-End RNAi Oligonucleotides to the Central Nervous System

[1587] RNAi oligonucleotides conjugated to a lipid at various positions of the sense strand were evaluated for their ability to reduce an astrocyte target expression in the CNS. RNAi oligonucleotides conjugated to a C16 lipid were generated as described above. Specifically, oligonucleotides having a blunt-end at the 3′ terminus and a 2-nucleotide overhang at the 5′ terminus were generated with a C16 lipid conjugated at positions (P) 1, 4, 8, 12, 13, 18, or 20 of the sense strand as shown in the modification patterns below. Select lipid-conjugated tetraloop oligonucleotides from Example 32 were included for comparison (P1, P4, P23, and P28). The unmodified sense and antisense strands are provided in SEQ ID NOs: 772 and 757, respectively, and the modified strands are shown in Table 32.

### Blunt-end RNAi Oligonucleotide Modification Patterns:

P1 Sense Strand:
[ademXs-C16][mX][mX][mX][mX][mX][mX][fX][fX][fX][fX][mX][mX][mX][mX][mX]
[mX][mXs][mXs][mX]
P4 Sense Strand:
[mXs][mX][mX][ademX-C16][mX][mX][mX][fX][fX][fX][fX][mX][mX][mX][mX][mX]
[mX][mXs][mXs][mX]
P8 Sense Strand:
[mXs][mX][mX][mX][mX][mX][mX][ademX-C16][fX][fX][fX][mX][mX][mX][mX][mX]
[mX][mXs][mXs][mX]
P12 Sense Strand:
[mXs][mX][mX][mX][mX][mX][mX][fX][fX][fX][fX][ademX-
C16][mX][mX][mX][mX][mX][mXs][mXs][mX]
P13 Sense Strand:
[mXs][mX][mX][mX][mX][mX][mX][fX][fX][fX][fX][mX][ademX-
C16][mX][mX][mX][mX][mXs][mXs][mX]
P18 Sense Strand:
[mXs][mX][mX][mX][mX][mX][mX][fX][fX][fX][fX][mX][mX][mX][mX][mX][mX]
[ademXs-C16][mXs][mX]
P20 Sense Strand:
[mXs][mX][mX][mX][mX][mX][mX][fX][fX][fX][fX][mX][mX][mX][mX][mX][mX]
[mXs][mXs][ademX-C16]

[1588] Each of P1, P4, P8, P12, P13, P18, and P20 hybridized to an antisense strand having the following modification pattern:

Antisense Strand:
[MePhosphonate-4O-
mXs][fXs][fXs][fX][fX][mX][fX][mX][mX][fX][mX]
[mX][mX][fX][mX][mX][mX][mX][mX][mXs][mXs][mX]

### Modification Key: Table 28

TABLE 32
Lipid-conjugated RNAi Blunt-End oligonucleotides

| | Sense Strand | Antisense Strand |
|---|---|---|
| Oligonucleotide | SEQ ID NO | SEQ ID NO |
| Blunt-End P1 C16 | 773 | 771 |
| Blunt-End P4 C16 | 774 | 771 |
| Blunt-End P8 C16 | 775 | 771 |
| Blunt-End P12 C16 | 776 | 771 |
| Blunt-End P13 C16 | 777 | 771 |
| Blunt-End P18 C16 | 778 | 771 |
| Blunt-End P20 C16 | 780 | 771 |

[1589] To evaluate the blunt-end oligonucleotide-lipid conjugates in Table 32, C57BL/6 female mice, 6-8 weeks old, were treated with 500 μg of lipid-conjugated blunt-end RNAi oligonucleotide formulated in artificial cerebrospinal fluid (aCSF) via intrathecal (i.t.) lumbar injection. Control animals were injected with aCSF only. Target expression was assessed 7 days after injection.

[1590] RNA was extracted from tissue samples from the lumbar spinal cord, medulla, cerebellum, hypothalamus, hippocampus, and frontal cortex to determine murine Gfap mRNA levels by qPCR (normalized to endogenous housekeeping gene Rpl23, as indicated). The levels of murine Gfap mRNA were determined using the methods described in Example 29. Gfap mRNA expression was reduced by about 50% or greater in samples from several tissues of the CNS (FIGS. 57A-57F). Specifically, all lipid conjugation positions significantly reduced Gfap mRNA in lumbar spinal cord and medulla (FIGS. 57A and 57B). mRNA expression was reduced in the cerebellum for oligonucleotides with a C16 lipid conjugated at P4, P12, P13, P18, or P20 (FIG. 57C). In the hypothalamus, expression was reduced by oligonucleotides with a C16 lipid conjugated at P1, P4, P12, P13, P18, or P20 (FIG. 57D). Minimal inhibition of Gfap mRNA was observed in the hippocampus and frontal cortex (FIGS. 57E and 57F, respectively). For each of the brain regions, the lipid-conjugated tetraloop oligonucleotides tested demonstrated similar expression reduction as that shown in Example 32. Overall, several positions of lipid-conjugation across blunt-end oligonucleotide are successful inhibitors of target mRNA in the CNS.

[1591] The percent remaining mRNA from the experiments described in Example 32 and the present example was compared. Specifically, the data is summarized in FIGS. 58A-58F to demonstrate potency across brain regions and lipid-positions in tetraloop and blunt-end oligonucleotides.

### Example 35: C16-Conjugated GFAP Blunt-End Oligonucleotides Inhibit Mouse Gfap In Vivo in a Concentration Dependent Manner

[1592] A blunt-end oligonucleotide with a C16 lipid conjugated at position 1 was assessed for the ability to reduce murine Gfap in the central nervous system (CNS) via i.t. administration in a concentration-dependent manner. Specifically, mice were administered 3, 10, 30, 100, or 300 μg of GFAP-1477 (SEQ ID NO: 773 (sense strand) and SEQ ID NO: 771 (antisense strand)) formulated in aCSF via i.t. injection. Animals were sacrificed 7- or 28-days following i.t. injection. RNA was extracted from liver tissue as described in Example 29. Reduction of Gfap expression was observed in a concentration-dependent manner across several tissues of the CNS. Specifically, at 7 days following injection, expression was reduced in the hypothalamus, cerebellum, brain stem, and lumbar spinal cord (FIG. 59A). The reduction was maintained out to 28-days in the same tissues, indicating long-term inhibition after a single administration of blunt-end oligonucleotide (FIG. 59B). Together, this data demonstrates the long-term potency of lipid-conjugated blunt-end oligonucleotides to inhibit astrocyte target mRNA.

### Example 36: Preparation of RNAi Oligonucleotides

### Oligonucleotide Synthesis and Purification

[1593] The oligonucleotides (RNAi oligonucleotides) described in the foregoing Examples were chemically synthesized using methods described herein. Generally, RNAi oligonucleotides were synthesized using solid phase oligonucleotide synthesis methods as described for 19-23mer RNAi oligonucleotides (see, e.g., Scaringe et al. (1990) NUCLEIC ACIDS RES. 18:5433-41 and Usman et al. (1987) J. AM. CHEM. SOC. 109:7845-45; see also, U.S. Pat. Nos. 5,804,683; 5,831,071; 5,998,203; 6,008,400; 6,111,086; 6,117,657; 6,353,098; 6,362,323; 6,437,117 and 6,469,158) in addition to using known phosphoramidite synthesis methodologies (see, e.g. Hughes and Ellington (2017) COLD SPRING HARB PERSPECT BIOL. 9(1):a023812; Beaucage S. L., Caruthers M. H. STUDIES ON NUCLEOTIDE CHEMISTRY V: Deoxynucleoside Phosphoramidites—A New Class of Key Intermediates for Deoxypolynucleotide Synthesis, TETRAHEDRON LETT. 1981; 22:1859-62. doi: 10.1016/S0040-4039(01) 90461-7; PCT application No. PCT/US2021/42469 (each of which incorporated herein by this reference)). RNAi oligonucleotides having a 19mer core sequence were formatted into constructs having a 36mer sense strand and a 22mer antisense strand to allow for processing by the RNAi machinery. The 19mer core sequence is complementary to a region in the UGT8 mRNA.

[1594] Individual RNA strands were synthesized and HPLC purified according to standard methods (Integrated DNA Technologies; Coralville, IA). For example, RNA oligonucleotides were synthesized using solid phase phosphoramidite chemistry, deprotected and desalted on NAP-5 columns (Amersham Pharmacia Biotech; Piscataway, NJ) using standard techniques (Damha & Olgivie (1993) METHODS MOL. BIOL. 20:81-114; Wincott et al. (1995) NUCLEIC ACIDS RES. 23:2677-84) and the phosphoramidite synthesis as shown below.

### Synthesis of 2-(2-((((6aR,8R,9R,9aR)-8-(6-benzamido-9H-purin-9-yl)-2,2,4,4-tetraisopropyltetrahydro-6H-furo[3,2-f][1,3,5,2,4]trioxadisilocin-9-yl)oxy)methoxy)ethoxy) ethan-1-ammonium formate (1-6)

[chemical structure]

[chemical structure]

[1595] A solution of compound 1-1 (25.00 g, 67.38 mmol) in 20 mL of DMF was treated with pyridine (11 mL, 134.67 mmol) and tetraisopropyldisiloxane dichloride (22.63 mL, 70.75 mmol) at 10° C. The resulting mixture was stirred at 25° C. for 3 h and quenched with 20% citric acid (50 mL). The aqueous layer was extracted with EtOAc (3×50 mL) and the combined organic layers were concentrated in vacuo. The crude residue was recrystallized from a mixture of MTBE and n-heptane (1:15, 320 mL) to afford compound 1-2 (37.20 g, 90%) as a white oily solid.

[1596] A solution of compound 1-2 (37.00 g, 60.33 mmol) in 20 mL of DMSO was treated with AcOH (20 mL, 317.20 mmol) and Ac₂O (15 mL, 156.68 mmol). The mixture was stirred at 25° C. for 15 h. The reaction was diluted with EtOAc (100 mL) and quenched with sat. K₂CO₃ (50 mL). The aqueous layer was extracted with EtOAc (3×50 mL). The combined organic layers were concentrated and recrystallized with ACN (30 mL) to afford compound 1-3 (15.65 g, 38.4%) as a white solid.

[1597] A solution of compound 1-3 (20.00 g, 29.72 mmol) in 120 mL of DCM was treated with Fmoc-amino-ethoxy ethanol (11.67 g, 35.66 mmol) at 25° C. The mixture was stirred to afford a clear solution and then treated with 4 Å molecular sieves (20.0 g), N-iodosuccinimide (8.02 g, 35.66 mmol), and TfOH (5.25 mL, 59.44 mmol). The mixture was stirred at 30° C. until the HPLC analysis indicated >95% consumption of compound 1-3. The reaction was quenched with TEA (6 mL) and filtered. The filtrate was diluted with EtOAc, washed with sat. NaHCO₃ (2×100 mL), sat. Na₂SO₃ (2×100 mL), and water (2×100 mL) and concentrated in vacuo to afford crude compound 1-4 (26.34 g, 93.9%) as a yellow solid, which was used directly for the next step without further purification.

[1598] A solution of compound 1-4 (26.34 g, 27.62 mmol) in a mixture of DCM/water (10:7, 170 mL) was treated with DBU (7.00 mL, 45.08 mmol) at 5° C. The mixture was stirred at 5-25° C. for 1 h. The organic layer was then separated, washed with water (100 mL), and diluted with DCM (130 mL). The solution was treated with fumaric acid (7.05 g, 60.76 mmol) and 4 Å molecular sieves (26.34 g) in four portions. The mixture was stirred for 1 h, concentrated, and recrystallized from a mixture of MTBE and DCM (5:1) to afford compound 1-6 (14.74 g, 62.9%) as a white solid: ¹H NMR (400 MHZ, d₆-DMSO) 8.73 (s, 1H), 8.58 (s, 1H), 8.15-8.02 (m, 2H), 7.65-7.60 (m, 1H), 7.59-7.51 (m, 2H), 6.52 (s, 2H), 6.15 (s, 1H), 5.08-4.90 (m, 3H), 4.83-4.78 (m, 1H), 4.15-3.90 (m, 3H), 3.79-3.65 (m, 2H), 2.98-2.85 (m, 6H), 1.20-0.95 (m, 28H).

### Synthesis of (2R,3R,4R,5R)-5-(6-benzamido-9H-purin-9-yl)-2-((bis(4-methoxyphenyl)(phenyl)methoxy)methyl)-4-((2-(2-[lipid]-amidoethoxy)ethoxy)methoxy) tetrahydrofuran-3-yl (2-cyanoethyl) diisopropylphosphoramidite (2-4a to 2-4e)

[chemical structure]

[chemical structure]

[1599] A solution of compound 1-6 (50.00 g, 59.01 mmol) in 150 mL of 2-methyltetrahydrofuran was washed with ice cold aqueous K₂HPO₄ (6%, 100 mL) and brine (20%, 2×100 mL). The organic layer was separated and treated with hexanoic acid (10.33 mL, 82.61 mmol), HATU (33.66 g, 88.52 mmol), and DMAP (10.81 g, 147.52 mmol) at 0° C. The resulting mixture was warmed to 25° C. and stirred for 1 h. The solution was washed with water (2×100 mL), brine (100 mL), and concentrated in vacuo to afford a crude residue. Flash chromatography on silica gel (1:1 hexanes/acetone) gave compound 2-1a (34.95 g, 71.5%) as a white solid.

[1600] A mixture of compound 2-1a (34.95 g, 42.19 mmol) and TEA (9.28 mL, 126.58 mmol) in 80 mL of THF was treated with triethylamine trihydrofluoride (20.61 mL, 126.58 mmol) dropwise at 10° C. The mixture was warmed to 25° C. and stirred for 2 h. The reaction was concentrated, dissolved in DCM (100 mL), and washed with sat. NaHCO₃ (5×20 mL) and brine (50 mL). The organic layer was concentrated in vacuo to afford crude compound 2-2a (24.72 g, 99%), which was used directly for the next step without further purification.

[1601] A solution of compound 2-2a (24.72 g, 42.18 mmol) in 50 mL of DCM was treated with N-methylmorpholine (18.54 mL, 168.67 mmol) and DMTr-Cl (15.69 g, 46.38 mmol). The mixture was stirred at 25° C. for 2 h and quenched with sat. NaHCO₃ (50 mL). The organic layer was separated, washed with water, concentrated to afford a slurry crude. Flash chromatography on silica gel (1:1 hexanes/acetone) gave compound 2-3a (30.05 g, 33.8 mmol, 79.9%) as a white solid.

[1602] A solution of compound 2-3a (25.00 g, 28.17 mmol) in 50 mL of DCM was treated with N-methylmorpholine (3.10 mL, 28.17 mmol) and tetrazole (0.67 mL, 14.09 mmol) under nitrogen atmosphere. Bis(diisopropylamino) chlorophosphine (9.02 g, 33.80 mmol) was added to the solution dropwise and the resulting mixture was stirred at 25° C. for 4 h. The reaction was quenched with water (15 mL), and the aqueous layer was extracted with DCM (3×50 mL). The combined organic layers were washed with sat. NaHCO₃ (50 mL), concentrated to afford a crude solid that was recrystallized from a mixture of DCM/MTBE/n-hexane (1:4:40) to afford compound 2-4a (25.52 g, 83.4%) as a white solid: ¹H NMR (400 MHz, d₆-DMSO) 11.25 (s, 1H), 8.65-8.60 (m, 2H), 8.09-8.02 (m, 2H), 7.71 (s, 1H), 7.67-7.60 (m, 1H), 7.59-7.51 (m, 2H), 7.38-7.34 (m, 2H), 7.30-7.25 (m, 7H), 6.85-6.79 (m, 4H), 6.23-6.20 (m, 1H), 5.23-5.14 (m, 1H), 4.80-4.69 (m, 3H), 4.33-4.23 (m, 2H), 3.90-3.78 (m, 1H), 3.75 (s, 6H), 3.74-3.52 (m, 3H), 3.50-3.20 (m, 6H), 3.14-3.09 (m, 2H), 3.09 (s, 1H), 2.82-2.80 (m, 1H), 2.65-2.60 (m, 1H), 2.05-1.96 (m, 2H), 1.50-1.39 (m, 2H), 1.31-1.10 (m, 14H), 1.08-1.05 (m, 2H), 0.85-0.79 (m, 3H); ³¹P NMR (162 MHz, d₆-DMSO) 149.43, 149.18.

[1603] Compound 2-4b, 2-4c, 2-4d, and 2-4e were prepared using similar procedures described above for compound 2-4a. Compound 2-4b was obtained (25.50 g, 85.4%) as a white solid: ¹H NMR (400 MHZ, d₆-DMSO) 11.23 (s, 1H), 8.65-8.60 (m, 2H), 8.05-8.02 (m, 2H), 7.73-7.70 (m, 1H), 7.67-7.60 (m, 1H), 7.59-7.51 (m, 2H), 7.38-7.34 (m, 2H), 7.30-7.25 (m, 7H), 6.89-6.80 (m, 4H), 6.21-6.15 (m, 1H), 5.23-5.17 (m, 1H), 4.80-4.69 (m, 3H), 4.40-4.21 (m, 2H), 3.91-3.80 (m, 1H), 3.74 (s, 6H), 3.74-3.52 (m, 3H), 3.50-3.20 (m, 6H), 3.14-3.09 (m, 2H), 3.09 (s, 1H), 2.83-2.79 (m, 1H), 2.68-2.62 (m, 1H), 2.05-1.97 (m, 2H), 1.50-1.38 (m, 2H), 1.31-1.10 (m, 18H), 1.08-1.05 (m, 2H), 0.85-0.78 (m, 3H); ³¹P NMR (162 MHz, d₆-DMSO) 149.43, 149.19.

[1604] Compound 2-4c was obtained (36.60 g, 66.3%) as an off-white solid: ¹H NMR (400 MHz, d₆-DMSO) 11.22 (s, 1H), 8.64-8.59 (m, 2H), 8.05-8.00 (m, 2H), 7.73-7.70 (m, 1H), 7.67-7.60 (m, 1H), 7.59-7.51 (m, 2H), 7.38-7.34 (m, 2H), 7.30-7.25 (m, 7H), 6.89-6.80 (m, 4H), 6.21-6.15 (m, 1H), 5.25-5.17 (m, 1H), 4.80-4.69 (m, 3H), 4.40-4.21 (m, 2H), 3.91-3.80 (m, 1H), 3.74 (s, 6H), 3.74-3.50 (m, 3H), 3.50-3.20 (m, 6H), 3.14-3.09 (m, 2H), 3.09 (s, 1H), 2.83-2.79 (m, 1H), 2.68-2.62 (m, 1H), 2.05-1.99 (m, 2H), 1.50-1.38 (m, 2H), 1.33-1.12 (m, 38H), 1.08-1.05 (m, 2H), 0.86-0.80 (m, 3H); ³¹P NMR (162 MHZ, d₆-DMSO) 149.42, 149.17.

[1605] Compound 2-4d was obtained (26.60 g, 72.9%) as an off-white solid: ¹H NMR (400 MHz, d₆-DMSO) 11.22 (s, 1H), 8.64-8.59 (m, 2H), 8.05-8.00 (m, 2H), 7.73-7.70 (m, 1H), 7.67-7.60 (m, 1H), 7.59-7.51 (m, 2H), 7.38-7.33 (m, 2H), 7.30-7.25 (m, 7H), 6.89-6.80 (m, 4H), 6.21-6.15 (m, 1H), 5.22-5.17 (m, 1H), 4.80-4.69 (m, 3H), 4.40-4.21 (m, 2H), 3.91-3.80 (m, 1H), 3.74 (s, 6H), 3.74-3.52 (m, 3H), 3.50-3.20 (m, 6H), 3.14-3.09 (m, 2H), 3.09 (s, 1H), 2.83-2.79 (m, 1H), 2.68-2.62 (m, 1H), 2.05-1.99 (m, 2H), 1.50-1.38 (m, 2H), 1.35-1.08 (m, 38H), 1.08-1.05 (m, 2H), 0.85-0.79 (m, 3H); ³¹P NMR (162 MHz, d₆-DMSO) 149.47, 149.22.

[1606] Compound 2-4e was obtained (38.10 g, 54.0%) as a white solid: ¹H NMR (400 MHZ, d₆-DMSO) 11.21 (s, 1H), 8.64-8.59 (m, 2H), 8.05-8.00 (m, 2H), 7.73-7.70 (m, 1H), 7.67-7.60 (m, 1H), 7.59-7.51 (m, 2H), 7.38-7.34 (m, 2H), 7.30-7.25 (m, 7H), 6.89-6.80 (m, 4H), 6.21-6.15 (m, 1H), 5.23-5.17 (m, 1H), 4.80-4.69 (m, 3H), 4.40-4.21 (m, 2H), 3.91-3.80 (m, 1H), 3.73 (s, 6H), 3.74-3.52 (m, 3H), 3.47-3.22 (m, 6H), 3.14-3.09 (m, 2H), 3.09 (s, 1H), 2.83-2.79 (m, 1H), 2.68-2.62 (m, 1H), 2.05-1.99 (m, 2H), 1.50-1.38 (m, 2H), 1.35-1.06 (m, 46H), 1.08-1.06 (m, 2H), 0.85-0.77 (m, 3H); ³¹P NMR (162 MHz, d₆-DMSO) 149.41, 149.15.

[1607] The oligomers were purified using ion-exchange high performance liquid chromatography (IE-HPLC) on an Amersham Source 15Q column (1.0 cm×25 cm; Amersham Pharmacia Biotech) using a 15 min step-linear gradient. The gradient varied from 90:10 Buffers A:B to 52:48 Buffers A:B, where Buffer A is 100 mM Tris pH 8.5 and Buffer B is 100 mM Tris pH 8.5, 1 M NaCl. Samples were monitored at 260 nm and peaks corresponding to the full-length oligonucleotide species were collected, pooled, desalted on NAP-5 columns, and lyophilized.

[1608] The purity of each oligomer was determined by capillary electrophoresis (CE) on a Beckman PACE 5000 (Beckman Coulter, Inc.; Fullerton, CA). The CE capillaries have a 100 μm inner diameter and contain ssDNA 100R Gel (Beckman-Coulter). Typically, about 0.6 nmole of oligonucleotide was injected into a capillary, run in an electric field of 444 V/cm, and was detected by UV absorbance at 260 nm. Denaturing Tris-Borate-7 M-urea running buffer was purchased from Beckman-Coulter. Oligoribonucleotides were obtained that were at least 90% pure as assessed by CE for use in experiments described below. Compound identity was verified by matrix-assisted laser desorption ionization time-of-flight (MALDI-TOF) mass spectroscopy on a Voyager DE™ Biospectometry Work Station (Applied Biosystems; Foster City, CA) following the manufacturer's recommended protocol. Relative molecular masses of all oligomers were obtained, often within 0.2% of expected molecular mass.

### Preparation of Duplexes

[1609] Single strand RNA oligomers were resuspended (e.g., at 100 μM concentration) in duplex buffer consisting of 100 mM potassium acetate, 30 mM HEPES, pH 7.5. Complementary sense and antisense strands were mixed in equal molar amounts to yield a final solution of, for example, 50 μM duplex. Samples were heated to 100° C. for 5′ in RNA buffer (IDT) and were allowed to cool to room temperature before use. The RNAi oligonucleotides were stored at −20° C. Single strand RNA oligomers were stored lyophilized or in nuclease-free water at −80° C.

[1610] The synthesis methods described herein are used to generate the lipid-conjugated oligonucleotides described in Example 38.

### Example 37: GalNAc-Conjugated UGT8 RNAi Oligonucleotides Inhibit Human UGT8 In Vivo

[1611] Uridine diphosphate Glycosyltransferase 8 (UGT8) is an enzyme involved in synthesizing galactosylceramide which is a glycosphingolipid of myelin. This product is primarily produced by oligodendrocytes in the central nervous system (CNS), and thus sufficient knockdown of UGT8 indicates ability of oligonucleotides described herein to reduce expression of target genes expressed in oligodendrocytes. To evaluate the ability of RNAi oligonucleotides to reduce UGT8 expression in vivo, an HDI mouse model was used. Specifically, oligonucleotides synthesized as described in Example 36 were used to generate double-stranded RNAi oligonucleotides comprising a nicked tetraloop GalNAc-conjugated structure (referred to herein as “GalNAc-conjugated UGT8 oligonucleotides” or “GalNAc-UGT8 oligonucleotides”) having a 36-mer passenger strand and a 22-mer guide strand. Further, the nucleotide sequences comprising the passenger strand and guide strand have a distinct pattern of modified nucleotides and phosphorothioate linkages. Three of the nucleotides comprising the tetraloop were each conjugated to a GalNAc moiety (CAS #14131-60-3). The modification pattern of each strand is illustrated below:

Sense Strand:
5′-[mXs][mX][mX][mX][mX][mX][mX][fX][fX][fX][fX][mX][mX][mX][mX]
[mX][mX][mX][mX][mX][mX][mX][mX][mX][mX][mX][mX][ademX-GalNAc][ademX-
GalNAc][ademX-GalNAc][mX][mX][mX][mX][mX][X]-3′

### Hybridized to:

Antisense Strand:
5′[MePhosphonate-4O-mXs][fXs][fX][fX][fX][mX]
[mX][mX][mX][fX][mX][mX][mX][fX][mX][mX][mX][mX]
[mX][mXs][mXs][mX]3′

TABLE 33
Modification key:

| Symbol | Modification/linkage |
|---|---|
| [MePhosphonate- | 4′-O-monomethylphosphonate-2′- |
| 4O-mX] | O-methyl modified nucleotide |
| [ademX-GalNAc] | GalNAc attached to a nucleotide |
| [mXs] | 2′-O-methyl modified nucleotide with a |
| | phosphorothioate linkage to the |
| | neighboring nucleotide |
| [fXs] | 2′-fluoro modified nucleotide with a |
| | phosphorothioate linkage to the |
| | neighboring nucleotide |
| [mX] | 2′-O-methyl modified nucleotide with |
| | phosphodiester linkages to |
| | neighboring nucleotides |
| [fX] | 2′-fluoro modified nucleotide with |
| | phosphodiester linkages to |
| | neighboring nucleotides |
| [ademX-C16] | C16 lipid attached to a nucleotide |
| [ademAs-C16] | C16 lipid attached to adenine nucleotide |
| | with a phosphorothioate linkage to the |
| | neighboring nucleotide |
| [ademCs-C16] | C16 lipid attached to cystosine nucleotide |
| | with a phosphorothioate linkage |
| | to the neighboring nucleotide |
| [ademXs-C16] | C16 lipid attached to a nucleotide |
| | with a phosphorothioate linkage to the |
| | neighboring nucleotide |
| [+X] | Locked Nucleic Acid |

[1612] Nine GalNAc-conjugated UGT8 oligonucleotides shown in Table 34 were evaluated. The oligonucleotides selected were based on a previous screen to identify potent UGT8-targeting oligonucleotides (data not shown). Oligonucleotides were evaluated in mice engineered to transiently express human UGT8 mRNA in hepatocytes of the mouse liver. Briefly, 6-week-old female CD-1 mice (n=5) were subcutaneously administered the indicated GalNAc-conjugated UGT8 oligonucleotides at a concentration of 0.3 mg/kg or 1 mg/kg formulated in PBS. A control group of mice (n=5) were administered only PBS. Three days later (72 hours), the mice were hydrodynamically injected (HDI) with 25 μg of DNA plasmid encoding the full human UGT8 gene (NM_001128174) under control of a ubiquitous cytomegalovirus (CMV) promoter sequence. One day after introduction of the DNA plasmid, liver samples from HDI mice were collected. Total RNA derived from these HDI mice were subjected to qRT-PCR analysis to determine UGT8 mRNA levels.

[1613] Specifically, RNA was extracted from liver tissue to determine murine UGT8 mRNA levels by qPCR (normalized to endogenous housekeeping gene Rpl23). The levels of human UGT8 mRNA were determined using PrimeTime™ qPCR Probe Assays (IDT), which consisted of a primer pair and fluorescently labeled 5′ nuclease probe specific to murine Ugt8 mRNA. The percentage of human UGT8 mRNA remaining in the samples from treated mice was determined using the 2^{-ΔΔCt} (“delta-delta Ct”) method (Livak and Schmittgen (2001) METHODS 25:402-408). The values were normalized for transfection efficiency using the NeoR gene included on the DNA plasmid.

TABLE 34
GalNAc-Conjugated Human UGT8 RNAi
Oligonucleotides for HDI screen

| | | Un- | Un- | | |
|---|---|---|---|---|---|
| | | modified | modified | Modified | Modified |
| | Species | Sense | Antisense | Sense | Antisense |
| | Targets | Strand | strand | Strand | strand |
| UGT8-277 | Hs/Mf/Mm | 804 | 813 | 822 | 831 |
| UGT8-278 | Hs/Mf/Mm | 805 | 814 | 823 | 832 |
| UGT8-505 | Hs/Mf/Mm | 806 | 815 | 824 | 833 |
| UGT8-508 | Hs/Mf/Mm | 807 | 816 | 825 | 834 |
| UGT8-509 | Hs/Mf/Mm | 808 | 817 | 826 | 835 |
| UGT8-513 | Hs/Mf/Mm | 809 | 818 | 827 | 836 |
| UGT8-616 | Hs/Mf/Mm | 810 | 819 | 828 | 837 |
| UGT8-843 | Hs/Mf/Mm | 811 | 820 | 829 | 838 |
| UGT8-1726 | Hs/Mf/Mm | 812 | 821 | 830 | 839 |

*Hs/Mf/Mm represents that the oligonucleotide recognizes human, monkey, and mouse UGT8

[1614] As shown in FIG. 60, each oligonucleotide reduced UGT8 expression by at least 50% at 1 mg/kg. UGT8-277 was the most potent oligonucleotide and reduced UGT8 expression by more than 75% at the lower 0.3 mg/kg concentration. This data demonstrates that GalNAc-modified oligonucleotides successfully reduce UGT8 expression in vivo.

### Example 38: RNAi Oligonucleotide Inhibition of UGT8 Expression in Mice Via Intrathecal Injection

[1615] The UGT8-277 oligonucleotide described in Example 37 was assessed for the ability to reduce murine Ugt8 expression in the central nervous system (CNS) following intrathecal (i.t.) administration. Specifically, mice were administered a single bolus of 10, 32, 100, 320, or 500 μg of UGT8-277, with a tetraloop having 2′-O-methyl (2′OMe) modified nucleotides (SEQ ID NO: 841 (sense strand) and SEQ ID NO: 831 (antisense strand)), formulated in artificial cerebrospinal fluid (aCSF) via i.t. lumbar injections. The modification patterns of each strand are illustrated below:

No Ligand Sense Strand:
5′-[mXs][mX][mX][mX][mX][mX][mX][fX][fX][fX][fX]
[mX][mX][mX][mX][mX][mX][mX][mX][mX][mX][mX][mX]
[mX][mX][mX][mX][mX][mX][mX][mX][mX][mX][mX][mX]
[mX]-3′

### Hybridized to:

Antisense Strand:
5′-[MePhosphonate-4O-mXs][fXs][fXs][fX][fX][mX]
[fX][mX][mX][fX][mX][mX][mX][fX][mX][mX][mX][mX]
[mX][mXs][mXs][mX]-3′

### (Modification Key: Table 33)

[1616] Animals were sacrificed 7 days following injection. RNA was isolated and measured as described in Example 37. Reduction of Ugt8 expression was observed in a concentration dependent manner across tissues of the CNS. Specifically, expression was reduced in lumbar spinal cord, cervical spinal cord, brainstem, cerebellum, hypothalamus, and frontal cortex as shown in FIGS. 61A-61F, respectively. EC₅₀ values were determined for each region of the brain based on the percent mRNA remaining in the tissue at each concentration of oligonucleotide (FIG. 62). Together, this data demonstrates Ugt8 targeting oligonucleotides having a 2′OMe tetraloop inhibit Ugt8 expression in several tissues of the CNS.

### Example 39: Synthesis of Tetraloop RNAi Oligonucleotide-Lipid Conjugates

[1617] Lipid-conjugated tetraloop oligonucleotides described herein can be synthesized using post-synthetic methods described in detail in PCT application No. PCT/US2021/42469. Specifically, the oligonucleotides can be synthesized using a post-synthetic conjugation approach such as that depicted below.

[chemical structure]

[1618] R₁COOH group represents fatty acid C8:0, C10:0, C11:0, C12:0, C14:0, C16:0, C17:0, C18:0, C18:1, C18:2, C22:5, C22:0, C24:0, C26:0, C22:6, C24:1, diacyl C16:0 or diacyl C18:1. Exemplary R¹ structures are provided below:

[chemical structure]

[1619] Synthesis Sense 1 and Antisense 1 were prepared by solid-phase synthesis.

Synthesis of Conjugated Sense 1a-1i.

[1620] Conjugated Sense 1a was synthesized through post-syntenic conjugation approach. In Eppendorf tube 1, a solution of octanoic acid (0.58 mg, 4 umol) in DMA (0.75 mL) was treated with HATU (1.52 mg, 4 umol) at rt. In Eppendorf tube 2, a solution of oligo Sense 1 (10.00 mg, 0.8 umol) in H₂O (0.25 mL) was treated with DIPEA (1.39 uL, 8 umol). The solution in Eppendorf tube 1 was added to the Eppendorf tube 2 and mixed using ThermoMixer at rt. After the reaction was completed indicated by LC-MS analysis, the reaction mixture was diluted with 5 mL of water and purified by revers phase XBridge C18 column using a 5-95% gradient of 100 mM TEAA in ACN and H₂O. The product fractions were concentrated under reduced pressure using Genevac. The combined residual solvent was dialyzed against water (1×), saline (1×), and water (3×) using Amicon® Ultra-15 Centrifugal (3K). The Amicon membrane was washed with water (3×2 mL) and the combined solvents were then lyophilized to afford an amorphous white solid of Conjugated Sense 1a (6.43 mg, 64% yield).

[1621] Conjugated Sense 1b-1i were prepared using similar procedures as described for the synthesis of Conjugated Sense 1a and obtained in 42%-69% yields.

Annealing of Duplex 1a-1j.

[1622] Conjugated Sense 1a (10 mg, measured by weight) was dissolved in 0.5 mL deionized water to prepare a 20 mg/mL solution. Antisense 1 (10 mg, measured by OD) was dissolved in 0.5 mL deionized water to prepare a 20 mg/mL solution, which was used for the titration of the conjugated sense and quantification of the duplex amount. Based on the calculation of molar amounts of both conjugated sense and antisense, a proportion of required Antisense 1 was added to the Conjugated Sense 1a solution. The resulting mixture was stirred at 95° C. for 5 min and allowed to cool down to rt. The annealing progress was monitored by ion-exchange HPLC. Based on the annealing progress, several proportions of Antisense 1 were further added to complete the annealing with >95% purity. The solution was lyophilized to afford Duplex 1a (C8) and its amount was calculated based on the molar amount of the antisense consumed in the annealing.

[1623] Duplex 1b-1i were prepared using the same procedures as described for the annealing of Duplex 1a (C8).

[1624] The following Scheme 1-2 depicts the synthesis of Nicked tetraloop GalXC conjugates with mono-lipid on the loop. Post-synthetic conjugation was realized through Cu-catalyzed alkyne-azide cycloaddition reaction.

[chemical structure]

[1625] Sense 1B and Antisense 1B were prepared by solid-phase synthesis.

### Synthesis of Conjugated Sense 1j.

[1626] In Eppendorf tube 1, a solution of oligo (10.00 mg, 0.8 μmol) in a 3:1 mixture of DMA/H₂O (0.5 mL) was treated with the lipid linker azide (11.26 mg, 4 μmol). In Eppendorf tube 2, CuBr dimethyl sulfide (1.64 mg, 8 μmol) was dissolved in ACN (0.5 mL). Both solutions were degassed for 10 min by bubbling N₂ through them. The ACN solution of CuBrSMe₂ was then added into tube 1 and the resulting mixture was stirred at 40° C. After the reaction was completed indicated by LC-MS analysis, the reaction mixture was diluted with 0.5 M EDTA (2 mL) and dialyzed against water (2×) using a Amicon® Ultra-15 Centrifugal (3K). The reaction crude was purified by revers phase XBridge C18 column using a 5-95% gradient of 100 mM TEAA in ACN (with 30% IPA spiked in) and H₂O. The product fractions were concentrated under reduced pressure using Genevac. The combined residual solvent was dialyzed against water (1×), saline (1×), and water (3×) using Amicon® Ultra-15 Centrifugal (3K). The Amicon membrane was washed with water (3×2 mL) and the combined solvents were lyophilized to afford an amorphous white solid of Conjugated Sense 1j (6.90 mg, 57% yield).

[1627] Duplex 1j (PEG2K-diacyl C18) was prepared using the same procedures as described for the annealing of Duplex 1a (C8).

[1628] The following Scheme 1-3 depicts the synthesis of Nicked tetraloop GalXC conjugates with di-lipid on the loop using post-synthetic conjugation approach.

[chemical structure]

[chemical structure]

[1629] Sense 2 and Antisense 2 were prepared by solid-phase synthesis.

[1630] Conjugated Sense 2a and 2b were prepared using similar procedures as described for the synthesis of Conjugated Sense 1a but with 10 eq of lipid, 10 eq of HATU, and 20 eq of DIPEA.

[1631] Duplex 2a (2XC11) and 2b (2XC22) were prepared using the same procedures as described for the annealing of Duplex 1a (C8).

[1632] The following Scheme 1-4 depicts the synthesis of GalXC of fully phosphorothioated stem-loop conjugated with mono-lipid using post-synthetic conjugation approach.

[chemical structure]

[1633] Sense 3 and Antisense 3 were prepared by solid-phase synthesis.

[1634] Conjugated Sense 3a was prepared using similar procedures as described for the synthesis of Conjugated Sense 1a and obtained in a 65% yield.

[1635] Duplex 3a (PS—C22) was prepared using the same procedures as described for the annealing of Duplex 1a (C8).

[1636] The following Scheme 1-5 depicts the synthesis of GalXC of short sense conjugated with mono-lipid using post-synthetic conjugation approach.

[chemical structure]

[1637] Sense 4 and Antisense 4 were prepared by solid-phase synthesis.

[1638] Conjugated Sense 4a was prepared using similar procedures as described for the synthesis of Conjugated Sense 1a and obtained in a 74% yield.

[1639] Duplex 4a (SS—C22) was prepared using the same procedures as described for the annealing of Duplex 1a (C8).

[1640] The following scheme 1-6 depicts an example of solid phase synthesis of Nicked tetraloop GalXC conjugated with lipid(s) on the loop.

[chemical structure]

### Synthesis of Conjugated Sense 6.

[1641] Conjugated Sense 6 was prepared by solid-phase synthesis using a commercial oligo synthesizer. The oligonucleotides were synthesized using 2′-modified nucleoside phosphoramidites, such as 2′-F or 2′-OMe, and 2′-diethoxymethanol linked fatty acid amide nucleoside phosphoramidites. Oligonucleotide synthesis was conducted on a solid support in the 3′ to 5′ direction using a standard oligonucleotide synthesis protocol. 5-ethylthio-1H-tetrazole (ETT) was used as an activator for the coupling reaction. Iodine solution was used for phosphite triester oxidation. 3-(Dimethylaminomethylidene)amino-3H-1,2,4-dithiazole-3-thione (DDTT) was used for the formation of phosphorothioate linkages. Synthesized oligonucleotides were treated with concentrated aqueous ammonium for 10 h. The ammonia was removed from the suspension and the solid support residues were removed by filtration. The crude oligonucleotide was treated with TEAA, analyzed, and purified by strong anion exchange high performance liquid chromatography (SAX-HPLC). The fractions were combined and dialyzed against water (3×), saline (1×), and water (3×) using Amicon® Ultra-15 Centrifugal (3K). The remaining solvent was then lyophilized to afford the desired Conjugated Sense 6.

[1642] Duplex 6 was prepared using the same procedures as described for the annealing of Duplex 1a (C8).

[1643] The following Scheme 1-7 depicts the synthesis of GalXC conjugated with mono-lipid at 5′-end using post-synthetic conjugation approach.

[chemical structure]

### Synthesis of Conjugated Sense 10a

[1644] Conjugated Sense 10a was obtained using the same method or a substantially similar method to the synthesis of Conjugated Sense 5.

### Synthesis Example of Duplex 10a

[1645] Duplex 10a was obtained using the same method or a substantially similar method to the synthesis of Duplex 5.

### Example 40: Positional Effects of Lipid Conjugation on the In Vivo Activity of Tetraloop RNAi Oligonucleotide Lipid-Conjugates in the Central Nervous System

[1646] The ability of RNAi oligonucleotide-lipid conjugates comprising a tetraloop to reduce mRNA expression in oligodendrocytes of the central nervous system (CNS) was evaluated in vivo. C16 conjugated Ugt8 oligonucleotides were generated by methods described in Example 36. Specifically, oligonucleotides having a tetraloop at the 3′ terminus and a 2-nucleotide overhang at the 5′ terminus were generated with a C16 lipid conjugated at a different position (positions (P) 1, 2, 3, 5, 13, 14, 15, 19, 20, 23, 28, 29, and 30) in the sense strand as shown in the patterns below. Each oligonucleotide tested comprised an antisense strand having a region of complementarity to mRNA encoding UGT8. The unmodified sense and antisense strands are provided in SEQ ID NOs: 804 and 813, respectively (UGT8-277). The modified strands are shown in Table 35.

### Tetraloop RNAi Oligonucleotide Modification Patterns:

P2 Sense Strand:
5′-[mXs][ademX-C16]
[mX][mX][mX][mX][mX][fX][fX][fX][fX][mX][mX][mX][mX][mX][mX][mX][mX][mX]
[mX][mX][mX][mX][mX][mX][mX][mX][mX][mX][mX][mX][mX][mX][mX][mX]′3′
P3 Sense Strand:
5′[mXs][mX][ademX-C16][mX][mX][mX][mX][fX][fX][fX][fX]
[mX][mX][mX][mX][mX][mX][mX][mX][mX][mX][mX][mX][mX][mX][mX]
[mX][mX][mX][mX][mX][mX][mX][mX][mX][mX]-3′
P6 Sense Strand:
5′-[mXs][mX][mX][mX][mX][ademX-C16][mX][fX][fX][fX][fX]
[mX][mX][mX][mX][mX][mX][mX][mX][mX][mX][mX][mX][mX][mX][mX][mX]
[mX][mX][mX][mX][mX][mX][mX][mX][mX]-3′
P13 Sense Strand:
5′-[mXs][mX][mX][mX][mX][mX][mX][fX][fX][fX][fX][mX][ademX-C16]
[mX][mX][mX][mX][mX][mX][mX][mX][mX][mX][mX][mX][mX][mX][mX][mX][mX]
[mX][mX][mX][mX][mX][mX]-3′
P14 Sense Strand:
5′-[mXs][mX][mX][mX][mX][mX][mX][fX][fX][fX][fX][mX][mX][ademX-C16]
[mX][mX][mX][mX][mX][mX][mX][mX][mX][mX][mX][mX][mX][mX][mX]
[mX][mX][mX][mX][mX][mX][mX]-3′
P15 Sense Strand:
5′-[mXs][mX][mX][mX][mX][mX][mX][fX][fX][fX][fX][mX][mX][mX][ademX-
C16][mX][mX][mX][mX][mX][mX][mX][mX][mX][mX][mX][mX][mX][mX][mX][mX]
[mX][mX][mX][mX][mX]-5′
P19 Sense Strand:
5′-[mXs][mX][mX][mX][mX][mX][mX][fX][fX][fX][fX][mX][mX][mX][mX][mX]
[mX][mX][ademX-C16][mX][mX][mX][mX][mX][mX][mX][mX][mX][mX]
[mX][mX][mX][mX][mX][mX][mX]-3′
P20 Sense Strand:
5′-[mXs][mX][mX][mX][mX][mX][mX][fX][fX][fX][fX][mX][mX][mX][mX][mX]
[mX][mX][mX][ademX-C16][mX][mX][mX][mX][mX][mX][mX]
[mX][mX][mX][mX][mX][mX][mX][mX][mX]-3′
P23 Sense Strand:
5′-[mXs][mX][mX][mX][mX][mX][mX][fX][fX][fX][fX][mX][mX][mX][mX][mX][mX]
[mX][mX][mX][mX][mX][ademX-C16][mX][mX][mX][mX][mX][mX][mX][mX]
[mX][mX][mX][mX][mX]-3′
P28 Sense Strand:
5′[mXs][mX][mX][mX][mX][mX][mX][fX][fX][fX][fX][mX][mX][mX][mX][mX][mX]
[mX][mX][mX][mX][mX][mX][mX][mX][mX][mX][ademX-C16][mX][mX][mX][mX]
[mX][mX][mX][mX]-3′
P29 Sense Strand:
5′-[mXs][mX][mX][mX][mX][mX][mX][fX][fX][fX][fX][mX][mX][mX][mX][mX][mX]
[mX][mX][mX][mX][mX][mX][mX][mX][mX][mX][mX][ademX-C16][mX]
[mX][mX][mX][mX][mX][mX]-3′
P30 Sense Strand:
5′-[mXs][mX][mX][mX][mX][mX][mX][fX][fX][fX][fX][mX][mX][mX][mX][mX]
[mX][mX][mX][mX][mX][mX][mX][mX][mX][mX][mX][mX][mX][ademX-
C16][mX][mX][mX][mX][mX][mX]-3′
P1 AdemC C16 Sense Strand:
5′-[ademCs-C16][mX][mX][mX][mX][mX][mX][fX][fX][fX]
[fX][mX][mX][mX][mX][mX][mX][mX][mX][mX][mX][mX][mX][mX][mX][mX][mX]
[mX][mX][mX][mX][mX][mX][mX][mX][mX]-3′
P1 AdemA C16 Mismatch Sense Strand:
5′-[ademAs-C16][mX][mX][mX][mX][mX][mX][fX][fX][fX][fX][mX]
[mX][mX][mX][mX][mX][mX][mX][mX][mX][mX][mX][mX][mX][mX][mX][mX]
[mX][mX][mX][mX][mX][mX][mX][mX]-3′

[1647] Each of P1, P2, P3, P6, P13, P14, P15, P19, P20, P23, P28, P29, and P30 hybridized to an antisense strand having the following modification pattern:

Antisense Strand:
[MePhosphonate-4O-mXs][fXs][fXs][fX][fX][mX][fX]
[mX][mX][fX][mX][mX][mX][fX][mX][mX][mX][mX][mX]
[mXs][mXs][mX]

### Modification Key: Table 33

TABLE 35
Lipid-conjugated RNAi Tetraloop Oligonucleotides

| | | Antisense |
|---|---|---|
| | Sense Strand | Strand |
| Oligonucleotide | SEQ ID NO | SEQ ID NO |
| Tetraloop No Ligand | 841 | 840 |
| Tetraloop P2 C16 | 842 | 840 |
| Tetraloop P3 C16 | 843 | 840 |
| Tetraloop P6 C16 | 844 | 840 |
| Tetraloop P13 C16 | 845 | 840 |
| Tetraloop P14 C16 | 846 | 840 |
| Tetraloop P15 C16 | 847 | 840 |
| Tetraloop P19 C16 | 848 | 840 |
| Tetraloop P20 C16 | 849 | 840 |
| Tetraloop P23 C16 | 850 | 840 |
| Tetraloop P28 C16 | 851 | 840 |
| Tetraloop P29 C16 | 852 | 840 |
| Tetraloop P30 C16 | 853 | 840 |
| Tetraloop P1 AdemC C16* | 854 | 840 |
| Tetraloop P1 AdemA C16 mismatch* | 855 | 840 |

*Position 1 of UGT8-277 sense strand (SEQ ID NO: 804) is a cytosine. For ademC C16 the cytosine was conjugated with a C16 lipid. For the ademA C16 mismatch the first nucleotide was modified to an adenine and conjugated with a C16 lipid.

[1648] To evaluate the tetraloop RNAi oligonucleotide lipid-conjugates in Table 35, C57BL/6 female mice, 6-8 weeks old, were treated with 300 μg of lipid-conjugated tetraloop RNAi oligonucleotide formulated in artificial cerebrospinal fluid (aCSF) via (i.t.) lumbar injection. Control animals were injected with aCSF only. Target knockdown was assessed 7 days after injection.

[1649] RNA was extracted from tissue samples from the lumbar spinal cord, medulla, hippocampus, and frontal cortex to determine murine Ugt8 mRNA levels by qPCR (normalized to endogenous housekeeping gene Rpl23, as indicated) as described in Example 37.

[1650] UGT8 mRNA expression was reduced in several tissues of the CNS after administration of UGT8-targeting tetraloop oligonucleotides having a lipid conjugated to a nucleotide of the oligonucleotide (FIGS. 63A-63D). Specifically, lipid conjugation at all positions tested resulted in at least 50% knockdown of the oligodendrocyte-specific mRNA in the lumbar spinal cord, whereas lipid conjugation at P19, P20, P23 or P28 resulted in at least 50% knockdown in the medulla; lipid conjugation at P2 resulted in at least 50% knockdown in the hippocampus; and lipid conjugation at P14, P15, P19, P20, P23, P28, P29 or P30 resulted in at least 50% knockdown in the frontal cortex. These results demonstrate that RNAi oligonucleotide-lipid conjugates comprising a tetraloop reduce exhibit the ability to reduce target (e.g., Ugt8) gene expression in CNS oligodendrocytes. Further, and without wishing to be bound by theory, lipid conjugation near or within the tetraloop provides the most efficient knockdown of a target mRNA expressed in an oligodendrocyte within various regions of the CNS.

### Example 41: Synthesis of Lipid-Conjugated Oligonucleotides

[1651] The following schematic depicts the synthesis of a blunt end oligonucleotide with a C16-lipid at the 5′-end. Lipid-conjugated blunt-ended oligonucleotides described herein can be synthesized using post-synthetic methods described in detail in PCT application No. PCT/US2021/42469. Specifically, the oligonucleotides can be synthesized using a post-synthetic conjugation approach such as that depicted below. In Eppendorf tube 1, a solution of palmitic acid in DMA was treated with HATU at rt. In Eppendorf tube 2, a solution of oligo sense strand in H₂O was treated with DIPEA. The solution in Eppendorf tube 1 was added to the Eppendorf tube 2 and mixed using ThermoMixer at rt. After the reaction was completed indicated by LC-MS analysis, the reaction mixture was diluted with 5 mL of water and purified by revers phase XBridge C18 column using a 5-95% gradient of 100 mM TEAA in ACN and H₂O. The product fractions were concentrated under reduced pressure using Genevac. The combined residual solvent was dialyzed against water (1×), saline (1×), and water (3×) using Amicon® Ultra-15 Centrifugal (3K). The Amicon membrane was washed with water (3×2 mL) and the combined solvents were then lyophilized to afford an amorphous white solid.

[chemical structure]

### Example 42: Positional Effects of Lipid Conjugation on the In Vivo Activity of Blunt-End RNAi Oligonucleotide-Lipid Conjugates in the Central Nervous System

[1652] RNAi oligonucleotides conjugated to a lipid at various positions of the sense strand were evaluated for their ability to reduce oligodendrocyte target expression in the CNS. RNAi oligonucleotides conjugated to a C16 lipid were generated by methods described in Example 36. Specifically, oligonucleotides having a blunt-end at the 3′ terminus and a 2-nucleotide overhang at the 5′ terminus were generated with a C16 lipid conjugated at a different position (positions (P) 2, 3, 6, 13, 14, 15, 19, and 20) in the sense strand as shown in the modification patterns below. Each oligonucleotide tested comprised an antisense strand having a region of complementarity to mRNA encoding Ugt8. The unmodified sense and antisense strands are provided in SEQ ID NOs: 856 and 813, respectively (UGT8-277), and the modified strands are shown in Table 36 and FIG. 64.

### Blunt-end RNAi Oligonucleotide Modification Patterns:

No Ligand Sense Strand:
5′-[mXs][mX][mX][mX][mX][mX][mX][fX][fX][fX][fX][mX][mX][mX][mX][mX][mX]
[mXs][mXs][mX]-3′
P2 Sense Strand:
5′-[mXs][ademX-
C16][mX][mX][mX][mX][mX][fX][fX][fX][fX][mX][mX][mX][mX][mX]
[mX][mXs][mXs][mX]-3′
P3 Sense Strand:
5′-[mXs][mX][ademX-
C16][mX][mX][mX][mX][fX][fX][fX][fX][mX][mX][mX][mX][mX]
[mX][mXs][mXs][mX]-3′
P6 Sense Strand:
5′-[mXs][mX][mX][mX][mX][ademX-
C16][mX][fX][fX][fX][fX][mX][mX][mX][mX][mX][mX][mXs][mXs][mX]-3′
P13 Sense Strand:
5′-[mXs][mX][mX][mX][mX][mX][mX][fX][fX][fX][fX][mX][ademX-
C16][mX][mX][mX][mX][mXs][mXs][mX]-3′
P14 Sense Strand:
5′-[mXs][mX][mX][mX][mX][mX][mX][fX][fX][fX][fX][mX][mX][ademX-
C16][mX][mX][mX][mXs][mXs][mX]-3′
P15 Sense Strand:
5′-[mXs][mX][mX][mX][mX][mX][mX][fX][fX][fX][fX][mX][mX][mX][ademX-
C16][mX][mX][mXs][mXs][mX]-3′
P19 Sense Strand:
5′-[mXs][mX][mX][mX][mX][mX][mX][fX][fX][fX][fX][mX][mX][mX][mX][mX]
[mX][mXs][ademXs-C16][mX]-3′
P20 Sense Strand:
5′-[mXs][mX][mX][mX][mX][mX][mX][fX][fX][fX][fX][mX][mX][mX][mX][mX][mX]
[mXs][mXs][ademX-C16]-3′

[1653] Each of P2, P3, P6, P13, P14, P15, P19, and P20 hybridized to an antisense strand having the following modification pattern:

Antisense Strand:
5′-[MePhosphonate-4O-mXs][fXs][fXs][fX][fX][mX]
[fX][mX][mX][fX][mX][mX][mX][fX][mX][mX][mX][mX]
[mX][mXs][mXs][mX]-3′

### Modification Kcy: Table 33

TABLE 36
Lipid-conjugated RNAi Blunt-End Oligonucleotides

| | Sense Strand | Antisense Strand |
|---|---|---|
| Oligonucleotide | SEQ ID NO | SEQ ID NO |
| Blunt-End No Ligand | 857 | 840 |
| Blunt-End P2 C16 | 858 | 840 |
| Blunt-End P3 C16 | 859 | 840 |
| Blunt-End P6 C16 | 860 | 840 |
| Blunt-End P13 C16 | 861 | 840 |
| Blunt-End P14 C16 | 862 | 840 |
| Blunt-End P15 C16 | 863 | 840 |
| Blunt-End P19 C16 | 864 | 840 |
| Blunt-End P20 C16 | 865 | 840 |

[1654] To evaluate the oligonucleotides in Table 36, C57BL/6 female mice, 6-8 weeks old, were treated with 300 μg of blunt-end RNAi oligonucleotide formulated in artificial cerebrospinal fluid (aCSF) via intrathecal (i.t.) lumbar injection. Target knockdown was assessed 7 days after injection.

[1655] RNA was extracted from tissue samples from the lumbar spinal cord, medulla, hippocampus, and frontal cortex to determine murine Ugt8 mRNA levels by qPCR as described in Example 37.

[1656] Ugt8 mRNA expression was reduced in several tissues of the CNS after administration of UGT8-targeting blunt-end RNAi oligonucleotide lipid-conjugates (FIGS. 65A-65D). Specifically, lipid conjugation at all positions tested resulted in at least 50% knockdown of the oligodendrocyte-specific mRNA in the lumbar spinal cord, whereas lipid conjugation at P2, P14 or P15 resulted in at least 50% knockdown in the medulla; lipid conjugation at P3 resulted in at least 50% knockdown in the hippocampus; and lipid conjugation at P14 resulted in at least 50% knockdown in the frontal cortex.

### Example 43: Positional Effects of Lipid Conjugation on the In Vivo Activity of Blunt-End RNAi Oligonucleotide-Lipid Conjugates in the Central Nervous System

[1657] Following the observation that oligodendrocyte-specific mRNA is reduced in the CNS after administration of lipid-conjugated RNAi oligonucleotides, additional lipid conjugation positions were evaluated in a long-term 28-day study. RNAi oligonucleotides conjugated to a C16 lipid were generated by methods described in Example 36. Specifically, oligonucleotides having a blunt-end at the 3′ terminus and a 2-nucleotide overhang at the 5′ terminus were generated with a C16 lipid conjugated at a different position (positions (P) 1, 3, 5, 7, 9, 11, 13, 15, 17, and 19) in the sense strand as shown in the modification patterns below and in FIGS. 66A-66B. Each oligonucleotide tested comprised an antisense strand having a region of complementarity to mRNA encoding Ugt8. The unmodified sense and antisense strands are provided in SEQ ID NOs: 856 and 813, respectively (UGT8-277), and the modified strands are shown in Table 37.

### Blunt-End RNAi Oligonucleotide Modification Patterns:

P1 Sense Strand:
5′-[ademXs-
C16][mX][mX][mX][mX][mX][mX][fX][fX][fX][fX][mX][mX][mX][mX][mX]
[mX][mXs][mXs][mX]-3′
P3 Sense Strand:
5′-[mXs][mX][ademX-
C16][mX][mX][mX][mX][fX][fX][fX][fX][mX][mX][mX][mX][mX]
[mX][mXs][mXs][mX]-3′
P5 Sense Strand:
5′-[mXs][mX][mX][mX][ademX-
C16][mX][mX][mX][fX][fX][fX][fX][mX][mX][mX][mX][mX][mXs][mXs][mX]-3′
P7 Sense Strand:
5′-[mXs][mX][mX][mX][mX][mX][ademX-
C16][fX][fX][fX][fX][mX][mX][mX][mX][mX][mX][mXs][mXs][mX]-3′
P9 Sense Strand:
5′-[mXs][mX][mX][mX][mX][mX][mX][fX][ademX-
C16][fX][fX][mX][mX][mX][mX][mX][X][mXs][mXs][mX]-3′
P11 Sense Strand:
5′-[mXs][mX][mX][mX][mX][mX][mX][fX][fX][fX][ademX-
C16][mX][mX][mX][mX][mX][mX][mXs][mXs][mX]-3′
P13 Sense Strand:
5′-[mXs][mX][mX][mX][mX][mX][mX][fX][fX][fX][fX][mX][ademX-
C16][mX][mX][mX][mX][mXs][mXs][mX]-3′
P15 Sense Strand:
5′-[mXs][mX][mX][mX][mX][mX][mX][fX][fX][fX][fX][mX][mX][mX][ademX-
C16][mX][mX][mXs][mXs][mX]-3′
P17 Sense Strand:
5′-[mXs][mX][mX][mX][mX][mX][mX][fX][fX][fX][fX][mX][mX][mX][mX][mX]
[ademX-C16][mXs][mXs][mX]-3′
P19 Sense Strand:
5′-[mXs][mX][mX][mX][mX][mX][mX][fX][fX][fX][fX][mX][mX][mX][mX][mX]
[mX][mXs][ademXs-C16][mX]-3′

[1658] Each of P1, P3, P5, P7, P9, P11, P13, P15, P17, and P19 hybridized to an antisense strand having the following modification pattern:

Antisense Strand:
5′-[MePhosphonate-4O-mXs][fXs][fXs][fX][fX][mX]
[mX][mX][mX][fX][mX][mX][mX][fX][mX][mX][mX][mX]
[mX][mXs][mXs][mX]-3′

### Modification Key: Table 36

TABLE 37
Lipid-conjugated RNAi Blunt-End Oligonucleotides

| | Sense Strand | Antisense Strand |
|---|---|---|
| Oligonucleotide | SEQ ID NO | SEQ ID NO |
| Blunt-End P1 C16 | 867 | 840 |
| Blunt-End P3 C16 | 859 | 840 |
| Blunt-End P5 C16 | 868 | 840 |
| Blunt-End P7 C16 | 869 | 840 |
| Blunt-End P9 C16 | 870 | 840 |
| Blunt-End P11 C16 | 871 | 840 |
| Blunt-End P13 C16 | 861 | 840 |
| Blunt-End P15 C16 | 863 | 840 |
| Blunt-End P17 C16 | 872 | 840 |
| Blunt-End P19 C16 | 864 | 840 |

[1659] To evaluate the oligonucleotides in Table 37, C57BL/6 female mice, 6-8 weeks old, were treated with 300 μg of blunt-end RNAi oligonucleotide formulated in artificial cerebrospinal fluid (aCSF) via intrathecal (i.t.) lumbar injection. Target knockdown was assessed 28 days after injection.

[1660] RNA was extracted from tissue samples from the lumbar spinal cord, brain stem, hypothalamus, hippocampus, and frontal cortex to determine murine Ugt8 mRNA levels by qPCR as described in Example 37.

[1661] Ugt8 mRNA expression was reduced in several tissues of the CNS after administration of UGT8-targeting blunt-end RNAi oligonucleotide lipid-conjugates (FIGS. 67A-67E). Specifically, lipid conjugation at all positions tested resulted in at least 50% knockdown of the oligodendrocyte-specific mRNA in the lumbar spinal cord. Lipid conjugation at P3, P5, P7 and P9 resulted in knockdown throughout the CNS, and lipid conjugation at P3 resulted in about a 50% knockdown in the hippocampus.

SEQUENCE LISTING-I

| | | | SEQ |
|---|---|---|---|
| Name | Strand | Sequence | ID NO |
| Pecam1- | Sense | ACAGAUACUCUAGAACGGAAGCAGCCGAAAGGCUG | 1 |
| 2392 | | C | |
| Pecam1- | Sense | AUUUUGUGUACUAUACCUAAGCAGCCGAAAGGCUG | 2 |
| 3222 | | C | |
| Cd68- | Sense | AGGCGCAGAAUUCAUCUCUAGCAGCCGAAAGGCUG | 3 |
| 0815 | | C | |
| Pecam1- | Anti- | UUCCGUUCUAGAGUAUCUGUGG | 4 |
| 2392 | sense | | |
| Pecam1- | Anti- | UUAGGUAUAGUACACAAAAUGG | 5 |
| 3222 | sense | | |
| Cd68- | Anti- | UAGAGAUGAAUUCUGCGCCUGG | 6 |
| 0815 | sense | | |
| Pecam1- | Sense | [ademAs-C22][mC][mA][mG][mA][mU][mA][fC][fU] | 7 |
| 2392 | | [fC][fU][mA][mG][mA][mA][mC][mG][mG][mA][mA][mG] | |
| | | [mC][mA][mG][mC][mC][mG][mA][mA][mA][mG][mG][mC] | |
| | | [mU][mG][mC] | |
| Pecam1- | Sense | [ademAs-C22][mU][mU][mU][mU][mG][mU][fG] | 8 |
| 3222 | | [fU][fA][fC][mU][mA][mU][mA][mC][mC][mU][mA][mA] | |
| | | [mG][mC][mA][mG][mC][mC][mG][mA][mA][mA][mG][mG] | |
| | | [mC][mU][mG][mC] | |
| Cd68- | Sense | [ademAs-C22][mG][mG][mC][mG][mC][mA][fG] | 9 |
| 0815 | | [fA][fA][fU][mU][mC][mA][mU][mC][mU][mC][mU][mA] | |
| | | [mG][mC][mA][mG][mC][mC][mG][mA][mA][mA][mG][mG] | |
| | | mC][mU][mG][mC] | |
| Pecam1- | Anti- | [MePhosphonate-4O-mUs][fUs][fCs][fC][fG][mU] | 10 |
| 2392 | sense | [fU][mC][mU][fA][mG][mA][mG][fU][mA][mU][mC][mU] | |
| | | [mG][mUs][mGs][mG] | |
| Pecam1- | Anti- | [MePhosphonate-4O-mUs][fUs][fAs][fG][fG][mU] | 11 |
| 3222 | sense | [fA][mU][mA][fG][mU][mA][mC][fA][mC][mA][mA][mA] | |
| | | [mA][mUs][mGs][mG] | |
| Cd68- | Anti- | [MePhosphonate-4O-mUs][fAs][fGs][fA][fG][mA][fU] | 12 |
| 0815 | sense | [mG][mA][fA][mU][mU][mC][fU][mG][mC][mG][mC][mC] | |
| | | [mUs][mGs][mG] | |
| Cd68- | Sense | AGGCGCAGAAUUCAUCUCUAGCAGCCGAAAGGCUG | 13 |
| 0815 | | C | |
| Cd68- | Sense | AGGCGCAGAAUUCAUCUCUA | 14 |
| 0815 | | | |
| Cd68- | Sense | GGCGCAGAAUUCAUCUCUA | 15 |
| 0815 | | | |
| Cd68- | Sense | GCGCAGAAUUCAUCUCUA | 16 |
| 0815 | | | |
| Cd68- | Sense | CGCAGAAUUCAUCUCUA | 17 |
| 0815 | | | |
| Cd68- | Sense | GCAGAAUUCAUCUCUA | 18 |
| 0815 | | | |
| Cd68- | Sense | CAGAAUUCAUCUCUA | 19 |
| 0815 | | | |
| Cd68- | Sense | GGCGCAGAAUUCAUCUC | 20 |
| 0815 | | | |
| Cd68- | Sense | GCGCAGAAUUCAUCUC | 21 |
| 0815 | | | |
| Cd68- | Sense | CGCAGAAUUCAUCUC | 22 |
| 0815 | | | |
| Cd68- | Sense | GCAGAAUUCAUCUC | 23 |
| 0815 | | | |
| Cd68- | Sense | CAGAAUUCAUCUC | 24 |
| 0815 | | | |
| Cd68- | Sense | GGCGCAGAAUUCAUCUC | 25 |
| 0815 | | | |
| Cd68- | Sense | GCGCAGAAUUCAUCUC | 26 |
| 0815 | | | |
| Cd68- | Sense | CGCAGAAUUCAUCUC | 27 |
| 0815 | | | |
| Cd68- | Sense | UAGAGAUGAAUUCUGCGCCUGG | 28 |
| 0815 | | | |
| Cd68- | Sense | UAGAGAUGAAUUCUGCGCCUGG | 29 |
| 0815 | | | |
| Cd68- | Sense | UAGAGAUGAAUUCUGCGCCUGG | 30 |
| 0815 | | | |
| Cd68- | Sense | UAGAGAUGAAUUCUGCGCCUGG | 31 |
| 0815 | | | |
| Cd68- | Sense | CGCAGAAUUCAUCUC | 32 |
| 0815 | | | |
| Cd68- | Sense | GCAGAAUUCAUCUC | 33 |
| 0815 | | | |
| Cd68- | Sense | CAGAAUUCAUCUC | 34 |
| 0815 | | | |
| Cd68- | Sense | GGCGCAGAAUUCATCUC | 35 |
| 0815 | | | |
| Cd68- | Sense | GCGCAGAAUUCATCUC | 36 |
| 0815 | | | |
| Cd68- | Sense | CGCAGAAUUCATCUC | 37 |
| 0815 | | | |
| Cd68- | Sense | GCAGAAUUCATCUC | 38 |
| 0815 | | | |
| Cd68- | Sense | CAGAAUUCATCUC | 39 |
| 0815 | | | |
| Cd68- | Sense | GGCGCAGAAUUCATCU | 40 |
| 0815 | | | |
| Cd68- | Sense | GCGCAGAAUUCATCU | 41 |
| 0815 | | | |
| Cd68- | Sense | CGCAGAAUUCATCU | 42 |
| 0815 | | | |
| Cd68- | Sense | GCAGAAUUCATCU | 43 |
| 0815 | | | |
| Cd68- | Sense | CAGAAUUCATCU | 44 |
| 0815 | | | |
| Cd68- | Sense | GGCGCAGAAUUCATC | 45 |
| 0815 | | | |
| Cd68- | Sense | GCGCAGAAUUCATC | 46 |
| 0815 | | | |
| Cd68- | Sense | CGCAGAAUUCATC | 47 |
| 0815 | | | |
| Cd68- | Sense | GCAGAAUUCATC | 48 |
| 0815 | | | |
| Cd68- | Sense | CAGAAUUCATC | 49 |
| 0815 | | | |
| Cd68- | Sense | AGAAUUCATC | 50 |
| 0815 | | | |
| Cd68- | Sense | GAAUUCATC | 51 |
| 0815 | | | |
| Cd68- | Sense | AAUUCATC | 52 |
| 0815 | | | |
| Cd68- | Sense | AGGCGCAGAAUUCAUCUCUA | 53 |
| 0815 | | | |
| Cd68- | Sense | CAGAAUUCAUCUCUAGCAGCCGAAAGGCUGC | 54 |
| 0815 | | | |
| Cd68- | Sense | CAGAAUUCAUCUCUAGCAGCCGAAAGGCUGC | 55 |
| 0815 | | | |
| Cd68- | Sense | CAGAAUUCAUCUCUAGCAGCCGAAAGGCUGC | 56 |
| 0815 | | | |
| Cd68- | Sense | CAGAAUUCAUCUCUAGCAGCCGAAAGGCUGC | 57 |
| 0815 | | | |
| Cd68- | Anti- | UAGAGAUGAAUUCUGCGCCUGG | 58 |
| 0815 | sense | | |
| Cd68- | Anti- | UAGAGAUGAAUUCUGCGCCUGG | 59 |
| 0815 | sense | | |
| Cd68- | Anti- | UAGAGAUGAAUUCUGCGCCUGG | 60 |
| 0815 | sense | | |
| Cd68- | Anti- | UAGAGAUGAAUUCUGCGCCUGG | 61 |
| 0815 | sense | | |
| Cd68- | Anti- | UAGAGAUGAAUUCUGCGCCUGG | 62 |
| 0815 | sense | | |
| Cd68- | Anti- | UAGAGAUGAAUUCUGCGCCUGG | 63 |
| 0815 | sense | | |
| Cd68- | Anti- | UAGAGAUGAAUUCUGCGCCUGG | 64 |
| 0815 | sense | | |
| Cd68- | Anti- | UAGAGAUGAAUUCUGCGCCUGG | 65 |
| 0815 | sense | | |
| Cd68- | Anti- | UAGAGAUGAAUUCUGCGCCUGG | 66 |
| 0815 | sense | | |
| Cd68- | Anti- | UAGAGAUGAAUUCUGCGCCUGG | 67 |
| 0815 | sense | | |
| Cd68- | Anti- | UAGAGAUGAAUUCUGCGCCUGG | 68 |
| 0815 | sense | | |
| Cd68- | Anti- | UAGAGAUGAAUUCUGCGCCUGG | 69 |
| 0815 | sense | | |
| Cd68- | Anti- | UAGAGAUGAAUUCUGCGCCUGG | 70 |
| 0815 | sense | | |
| Cd68- | Anti- | UAGAGAUGAAUUCUGCGCCUGG | 71 |
| 0815 | sense | | |
| Cd68- | Anti- | UAGAGAUGAAUUCUGCGCCUGG | 72 |
| 0815 | sense | | |
| Cd68- | Anti- | UAGAGAUGAAUUCUGCGCCUGG | 73 |
| 0815 | sense | | |
| Cd68- | Anti- | UAGAGAUGAAUUCUGCGCCUGG | 74 |
| 0815- | sense | | |
| Cd68- | Anti- | UAGAGAUGAAUUCUGCGCCUGG | 75 |
| 0815 | sense | | |
| Cd68- | Anti- | UAGAGAUGAAUUCUGCGCCUGG | 76 |
| 0815 | sense | | |
| Cd68- | Anti- | UAGAGAUGAAUUCUGCGCCUGG | 77 |
| 0815 | sense | | |
| Cd68- | Anti- | UAGAGAUGAAUUCUGCGCCUGG | 78 |
| 0815 | sense | | |
| Cd68- | Anti- | UAGAGAUGAAUUCUGCGCCUGG | 79 |
| 0815 | sense | | |
| Cd68- | Anti- | UAGAGAUGAAUUCUGCGCCUGG | 80 |
| 0815 | sense | | |
| Cd68- | Anti- | UAGAGAUGAAUUCUGCGCCUGG | 81 |
| 0815 | sense | | |
| Cd68- | Anti- | UAGAGAUGAAUUCUGCGCCUGG | 82 |
| 0815 | sense | | |
| Cd68- | Anti- | UAGAGAUGAAUUCUGCGCCUGG | 83 |
| 0815 | sense | | |
| Cd68- | Anti- | UAGAGAUGAAUUCUGCGCCUGG | 84 |
| 0815 | sense | | |
| Cd68- | Anti- | UAGAGAUGAAUUCUGCGCCUGG | 85 |
| 0815 | sense | | |
| Cd68- | Anti- | UAGAGAUGAAUUCUGCGCCUGG | 86 |
| 0815 | sense | | |
| Cd68- | Anti- | UAGAGAUGAAUUCUGCGCCUGG | 87 |
| 0815 | sense | | |
| Cd68- | Anti- | UAGAGAUGAAUUCUGCGCCUGG | 88 |
| 0815 | sense | | |
| Cd68- | Anti- | UAGAGAUGAAUUCUGCGCCUGG | 89 |
| 0815 | sense | | |
| Cd68- | Anti- | UAGAGAUGAAUUCUGCGCCUGG | 90 |
| 0815 | sense | | |
| Cd68- | Anti- | UAGAGAUGAAUUCUGCGCCUGG | 91 |
| 0815 | sense | | |
| Cd68- | Anti- | UAGAGAUGAAUUCUGCGCCUGG | 92 |
| 0815 | sense | | |
| Cd68- | Anti- | UAGAGAUGAAUUCUGCGCCUGG | 93 |
| 0815 | sense | | |
| Cd68- | Anti- | UAGAGAUGAAUUCUGCGCCUGG | 94 |
| 0815 | sense | | |
| Cd68- | Anti- | UAGAGAUGAAUUCUGCGCCUGG | 95 |
| 0815 | sense | | |
| Cd68- | Anti- | UAGAGAUGAAUUCUGCGCCUGG | 96 |
| 0815 | sense | | |
| Cd68- | Anti- | UAGAGAUGAAUUCUGCGCCUGG | 97 |
| 0815 | sense | | |
| Cd68- | Anti- | UAGAGAUGAAUUCUGCGCCUGG | 98 |
| 0815 | sense | | |
| Cd68- | Anti- | UAGAGAUGAAUUCUGCGCCUGG | 99 |
| 0815 | sense | | |
| Cd68- | Anti- | UAGAGAUGAAUUCUGCGCCUGG | 100 |
| 0815 | sense | | |
| Cd68- | Anti- | UAGAGAUGAAUUCUGCGCCUGG | 101 |
| 0815 | sense | | |
| Cd68- | Anti- | UAGAGAUGAAUUCUGCGCCUGG | 102 |
| 0815 | sense | | |
| Cd68- | Sense | [mAs][mG][mG][mC][mG][mC][mA][fG][fA][fA][fU][mU] | 103 |
| 0815 | | [mC][mA][mU][mC][mU][mC][mU][mA][mG][mC][mA][mG] | |
| | | [mC][mC][mG][ademA-C22][mA][mA][mG] | |
| | | [mG][mC][mU][mG][mC] | |
| Cd68- | Sense | [mAs][mG][mG][mC][mG][mC][ademA-C22][fG][fA] | 104 |
| 0815 | | [fA][fU][mU][mC][mA][mU][mC][mU][mCs][mUs][mA] | |
| Cd68- | Sense | [mGs][mG][mC][mG][mC][ademA-C22][fG][A][fA][fU] | 105 |
| 0815 | | [mU][mC][mA][mU][mC][mU][mCs][mUs][mA] | |
| Cd68- | Sense | [mGs][mC][mG][mC][ademA-C22][fG][fA][fA][fU][mU] | 106 |
| 0815 | | [mC][mA][mU][mC][mU][mCs][mUs][mA] | |
| Cd68- | Sense | [mCs][mG][mC][ademA-C22][fG][A][fA][fU] | 107 |
| 0815 | | [mU][mC][mA][mU][mC][mU][mCs][mUs][mA] | |
| Cd68- | Sense | [mGs][mC][ademA-C22][fG][fA][fA][fU][mU] | 108 |
| 0815 | | [mC][mA][mU][mC][mU][mCs][mUs][mA] | |
| Cd68- | Sense | [mCs][ademA-C22][fG][fA][fA][fU][mU][mC] | 109 |
| 0815 | | [mA][mU][mC][mU][mCs][mUs][mA] | |
| Cd68- | Sense | [mGs][mG][mC][mG][mC][ademA-C22][fG][fA][fA][fU] | 110 |
| 0815 | | [mU][mC][mA][mU][mCs][mUs][mC] | |
| Cd68- | Sense | [mGs][mC][mG][mC][ademA-C22][fG][fA][fA][fU] | 111 |
| 0815 | | [mU][mC][mA][mU][mCs][mUs][mC] | |
| Cd68- | Sense | [mCs][mG][mC][ademA-C22][fG][fA][fA][fU] | 112 |
| 0815 | | [mU][mC][mA][mU][mCs][mUs][mC] | |
| Cd68- | Sense | [mGs][mC][ademA-C22][fG][fA][fA][fU][mU][mC] | 113 |
| 0815 | | [mA][mU][mCs][mUs][mC] | |
| Cd68- | Sense | [mCs][ademA-C22][fG][fA][fA][fU][mU][mC][mA][mU] | 114 |
| 0815 | | [mCs][mUs][mC] | |
| Cd68- | Sense | [+Gs][mG][mC][mG][mC][ademA-C22][fG][fA][fA][fU] | 115 |
| 0815 | | [mU][mC][mA][mU][mCs][mUs][mC] | |
| Cd68- | Sense | [+Gs][mC][mG][mC][ademA- | 116 |
| 0815 | | C22][fG][fA][fA][fU][mU][mC][mA][mU][mCs][mUs][mC] | |
| Cd68- | Sense | [+Cs][mG][mC][ademA- | 117 |
| 0815 | | C22][fG][fA][fA][fU][mU][mC][mA][mU][mCs][mUs][mC] | |
| Cd68- | Sense | [+Gs][mC][ademA- | 118 |
| 0815 | | C22][fG][A][fA][fU][mU][mC][mA][mU][mCs][mUs][mC] | |
| Cd68- | Sense | [+Cs][ademA- | 119 |
| 0815 | | C22][fG][fA][fA][fU][mU][mC][mA][mU][mCs][mUs][mC] | |
| Cd68- | Sense | [+Gs][mG][mC][mG][mC][ademA- | 120 |
| 0815 | | C22][fG][fA][fA][fU][mU][mC][mA][mU][+Cs][mUs][mC] | |
| Cd68- | Sense | [+Gs][mC][mG][mC][ademA- | 121 |
| 0815 | | C22][fG][fA][fA][fU][mU][mC][mA][mU][+Cs][mUs][mC] | |
| Cd68- | Sense | [+Cs][mG][mC][ademA- | 122 |
| 0815 | | C22][fG][fA][fA][fU][mU][mC][mA][mU][+Cs][mUs][mC] | |
| Cd68- | Sense | [+Gs][mC][ademA- | 123 |
| 0815 | | C22][fG][fA][fA][fU][mU][mC][mA][mU][+Cs][mUs][mC] | |
| Cd68- | Sense | [+Cs][ademA- | 124 |
| 0815 | | C22][fG][fA][fA][fU][mU][mC][mA][mU][+Cs][mUs][mC] | |
| Cd68- | Sense | [+Gs][mG][mC][mG][mC][ademA- | 125 |
| 0815 | | C22][fG][fA][fA][fU][mU][mC][mA][+T][+Cs][mUs][mC] | |
| Cd68- | Sense | [+Gs][mC][mG][mC][ademA- | 126 |
| 0815 | | C22][fG][fA][fA][fU][mU][mC][mA][+T][+Cs][mUs][mC] | |
| Cd68- | Sense | [+Cs][mG][mC][ademA- | 127 |
| 0815 | | C22][fG][fA][fA][fU][mU][mC][mA][+T][+Cs][mUs][mC] | |
| Cd68- | Sense | [+Gs][mC][ademA- | 128 |
| 0815 | | C22][fG][fA][fA][fU][mU][mC][mA][+T][+Cs][mUs][mC] | |
| Cd68- | Sense | [+Cs][ademA- | 129 |
| 0815 | | C22][fG][fA][fA][fU][mU][mC][mA][+T][+Cs][mUs][mC] | |
| Cd68- | Sense | [+Gs][mG][mC][mG][mC][ademA- | 130 |
| 0815 | | C22][fG][fA][fA][fU][mU][mC][mA][+Ts][+Cs][mU] | |
| Cd68- | Sense | [+Gs][mC][mG][mC][ademA- | 131 |
| 0815 | | C22][fG][fA][fA][fU][mU][mC][mA][+Ts][+Cs][mU] | |
| Cd68- | Sense | [+Cs][mG][mC][ademA- | 132 |
| 0815 | | C22][fG][fA][fA][fU][mU][mC][mA][+Ts][+Cs][mU] | |
| Cd68- | Sense | [+Gs][mC][ademA- | 133 |
| 0815 | | C22][fG][fA][fA][fU][mU][mC][mA][+Ts][+Cs][mU] | |
| Cd68- | Sense | [+Cs][ademA- | 134 |
| 0815 | | C22][fG][fA][fA][fU][mU][mC][mA][+Ts][+Cs][mU] | |
| Cd68- | Sense | [+Gs][mG][mC][mG][mC][ademA- | 135 |
| 0815 | | C22][fG][fA][fA][fU][mU][mC][mAs][+Ts][+C] | |
| Cd68- | Sense | [+Gs][mC][mG][mC][ademA- | 136 |
| 0815 | | C22][fG][fA][fA][fU][mU][mC][mAs][+Ts][+C] | |
| Cd68- | Sense | [+Cs][mG][mC][ademA- | 137 |
| 0815 | | C22][fG][fA][fA][fU][mU][mC][mAs][+Ts][+C] | |
| Cd68- | Sense | [+Gs][mC][ademA- | 138 |
| 0815 | | C22][fG][fA][fA][fU][mU][mC][mAs][+Ts][+C] | |
| Cd68- | Sense | [+Cs][ademA- | 139 |
| 0815 | | C22][fG][fA][fA][fU][mU][mC][mAs][+Ts][+C] | |
| Cd68- | Sense | [+As][fG][fA][ademA-C22][fU][mU][mC][mAs][+Ts][+C] | 140 |
| 0815 | | | |
| Cd68- | Sense | [+Gs][fA][ademA-C22][fU][mU][mC][mAs][+Ts][+C] | 141 |
| 0815 | | | |
| Cd68- | Sense | [+As][ademA-C22][fU][mU][mC][mAs][+Ts][+C] | 142 |
| 0815 | | | |
| Cd68- | Sense | [mAs][mG][mG][mC][mG][mC][mA][fG][fA][fA][fU][mU] | 143 |
| 0815 | | [mC][mA][mU][mC][mU][mCs][mUs][mA] | |
| Cd68- | Sense | [mCs][mA][fG][fA][fA][fU][mU][mC][mA][mU][mC][mU] | 144 |
| 0815 | | [mC][mU][mA][mG][mC][mA][mG][mC][mC][mG][ademA- | |
| | | C22][mA][mA][mG][mG][mC][mU][mG][mC] | |
| Cd68- | Sense | [mCs][mA][fG][fA][fA][fU][mU][mC][mA][mU][mC][mU] | 145 |
| 0815 | | [mC][mU][mA][mG][mC][mA][mG][mC][mC][mG][ademA- | |
| | | C22][mA][mA][mG][mG][mC][mU][mG][mC] | |
| Cd68- | Sense | [mCs][mA][fG][fA][fA][fU][mU][mC][mA][mU][mC][mU] | 146 |
| 0815 | | [mC][mU][mA][mG][mC][mA][mG][mC][mC][mG][ademA- | |
| | | C22][mA][mA][mG][mG][mC][mU][mG][mC] | |
| Cd68- | Sense | [mCs][mA][fG][fA][fA][fU][mU][mC][mA][mU][mC][mU] | 147 |
| 0815 | | [mC][mU][mA][mG][mC][mA][mG][mC][mC][mG][ademA- | |
| | | C22][mA][mA][mG][mG][mC][mU][mG][mC] | |
| Cd68- | Anti- | [MePhosphonate-4O- | 148 |
| 0815 | sense | mUs][fAs][fGs][fA][fG][mA][fU][mG][mA][fA][mU][mU] | |
| | | [mC][fU][mG][mC][mG][mC][mC][mUs][mGs][mG] | |
| Cd68- | Anti- | [MePhosphonate-4O- | 149 |
| 0815 | sense | mUs][fAs][fGs][fA][fG][mA][fU][mG][mA][fA][mU][mU] | |
| | | [mC][fU][mG][mC][mG][mC][mC][mUs][mGs][mG] | |
| Cd68- | Anti- | [MePhosphonate-4O- | 150 |
| 0815 | sense | mUs][fAs][fGs][fA][fG][mA][fU][mG][mA][fA][mU][mU] | |
| | | [mC][fU][mG][mC][mG][mC][mC][mUs][mGs][mG] | |
| Cd68- | Anti- | [MePhosphonate-4O- | 151 |
| 0815 | sense | mUs][fAs][fGs][fA][fG][mA][fU][mG][mA][fA][mU][mU] | |
| | | [mC][fU][mG][mC][mG][mC][mC][mUs][mGs][mG] | |
| Cd68- | Anti- | [MePhosphonate-4O- | 152 |
| 0815 | sense | mUs][fAs][fGs][fA][fG][mA][fU][mG][mA][fA][mU][mU] | |
| | | [mC][fU][mG][mC][mG][mC][mC][mUs][mGs][mG] | |
| Cd68- | Anti- | [MePhosphonate-4O- | 153 |
| 0815 | sense | mUs][fAs][fGs][fA][fG][mA][fU][mG][mA][fA][mU][mU] | |
| | | [mC][fU][mG][mC][mG][mC][mC][mUs][mGs][mG] | |
| Cd68- | Anti- | [MePhosphonate-4O- | 154 |
| 0815 | sense | mUs][fAs][fGs][fA][fG][mA][fU][mG][mA][fA][mU][mU] | |
| | | [mC][fU][mG][mC][mG][mC][mC][mUs][mGs][mG] | |
| Cd68- | Anti- | [MePhosphonate-4O- | 155 |
| 0815 | sense | mUs][fAs][fGs][fA][fG][mA][fU][mG][mA][fA][mU][mU] | |
| | | [mC][fU][mG][mC][mG][mC][mC][mUs][mGs][mG] | |
| Cd68- | Anti- | [MePhosphonate-4O- | 156 |
| 0815 | sense | mUs][fAs][fGs][fA][fG][mA][fU][mG][mA][fA][mU][mU] | |
| | | [mC][fU][mG][mC][mG][mC][mC][mUs][mGs][mG] | |
| Cd68- | Anti- | [MePhosphonate-4O- | 157 |
| 0815 | sense | mUs][fAs][fGs][fA][fG][mA][fU][mG][mA][fA][mU][mU] | |
| | | [mC][fU][mG][mC][mG][mC][mC][mUs][mGs][mG] | |
| Cd68- | Anti- | [MePhosphonate-4O- | 158 |
| 0815 | sense | mUs][fAs][fGs][fA][fG][mA][fU][mG][mA][fA][mU][mU] | |
| | | [mC][fU][mG][mC][mG][mC][mC][mUs][mGs][mG] | |
| Cd68- | Anti- | [MePhosphonate-4O- | 159 |
| 0815 | sense | mUs][fAs][fGs][fA][fG][mA][fU][mG][mA][fA][mU][mU] | |
| | | [mC][fU][mG][mC][mG][mC][mC][mUs][mGs][mG] | |
| Cd68- | Anti- | [MePhosphonate-4O- | 160 |
| 0815 | sense | mUs][fAs][fGs][fA][fG][mA][fU][mG][mA][fA][mU][mU] | |
| | | [mC][fU][mG][mC][mG][mC][mC][mUs][mGs][mG] | |
| Cd68- | Anti- | [MePhosphonate-4O- | 161 |
| 0815 | sense | mUs][fAs][fGs][fA][fG][mA][fU][mG][mA][fA][mU][mU] | |
| | | [mC][fU][mG][mC][mG][mC][mC][mUs][mGs][mG] | |
| Cd68- | Anti- | [MePhosphonate-4O- | 162 |
| 0815 | sense | mUs][fAs][fGs][fA][fG][mA][fU][mG][mA][fA][mU][mU] | |
| | | [mC][fU][mG][mC][mG][mC][mC][mUs][mGs][mG] | |
| Cd68- | Anti- | [MePhosphonate-4O- | 163 |
| 0815 | sense | mUs][fAs][fGs][fA][fG][mA][fU][mG][mA][fA][mU][mU] | |
| | | [mC][fU][mG][mC][mG][mC][mC][mUs][mGs][mG] | |
| Cd68- | Anti- | [MePhosphonate-4O- | 164 |
| 0815 | sense | mUs][fAs][fGs][fA][fG][mA][fU][mG][mA][fA][mU][mU] | |
| | | C[m][fU][mG][mC][mG][mC][mC][mUs][mGs][mG] | |
| Cd68- | Anti- | [MePhosphonate-4O- | 165 |
| 0815 | sense | mUs][fAs][fGs][fA][fG][mA][fU][mG][mA][fA][mU][mU] | |
| | | [mC][fU][mG][mC][mG][mC][mC][mUs][mGs][mG] | |
| Cd68- | Anti- | [MePhosphonate-4O- | 166 |
| 0815 | sense | mUs][fAs][fGs][fA][fG][mA][fU][mG][mA][fA][mU][mU] | |
| | | [mC][fU][mG][mC][mG][mC][mC][mUs][mGs][mG] | |
| Cd68- | Anti- | [MePhosphonate-4O- | 167 |
| 0815 | sense | mUs][fAs][fGs][fA][fG][mA][fU][mG][mA][fA][mU][mU] | |
| | | [mC][fU][mG][mC][mG][mC][mC][mUs][mGs][mG] | |
| Cd68- | Anti- | [MePhosphonate-4O- | 168 |
| 0815 | sense | mUs][fAs][fGs][fA][fG][mA][fU][mG][mA][fA][mU][mU] | |
| | | [mC][fU][mG][mC][mG][mC][mC][mUs][mGs][mG] | |
| Cd68- | Anti- | [MePhosphonate-4O- | 169 |
| 0815 | sense | mUs][fAs][fGs][fA][fG][mA][fU][mG][mA][fA][mU][mU] | |
| | | [mC][fU][mG][mC][mG][mC][mC][mUs][mGs][mG] | |
| Cd68- | Anti- | [MePhosphonate-4O- | 170 |
| 0815 | sense | mUs][fAs][fGs][fA][fG][mA][fU][mG][mA][fA][mU][mU] | |
| | | [mC][fU][mG][mC][mG][mC][mC][mUs][mGs][mG] | |
| Cd68- | Anti- | [MePhosphonate-4O- | 171 |
| 0815 | sense | mUs][fAs][fGs][fA][fG][mA][fU][mG][mA][fA][mU][mU] | |
| | | [mC][fU][mG][mC][mG][mC][mC][mUs][mGs][mG] | |
| Cd68- | Anti- | [MePhosphonate-4O- | 172 |
| 0815 | sense | mUs][fAs][fGs][fA][fG][mA][fU][mG][mA][fA][mU][mU] | |
| | | [mC][fU][mG][mC][mG][mC][mC][mUs][mGs][mG] | |
| Cd68- | Anti- | [MePhosphonate-4O- | 173 |
| 0815 | sense | mUs][fAs][fGs][fA][fG][mA][fU][mG][mA][fA][mU][mU] | |
| | | [mC][fU][mG][mC][mG][mC][mC][mUs][mGs][mG] | |
| Cd68- | Anti- | [MePhosphonate-4O- | 174 |
| 0815 | sense | mUs][fAs][fGs][fA][fG][mA][fU][mG][mA][fA][mU][mU] | |
| | | [mC][fU][mG][mC][mG][mC][mC][mUs][mGs][mG] | |
| Cd68- | Anti- | [MePhosphonate-4O- | 175 |
| 0815 | sense | mUs][fAs][fGs][fA][fG][mA][fU][mG][mA][fA][mU][mU] | |
| | | [mC][fU][mG][mC][mG][mC][mC][mUs][mGs][mG] | |
| Cd68- | Anti- | [MePhosphonate-4O- | 176 |
| 0815 | sense | mUs][fAs][fGs][fA][fG][mA][fU][mG][mA][fA][mU][mU] | |
| | | [mC][fU][mG][mC][mG][mC][mC][mUs][mGs][mG] | |
| Cd68- | Anti- | [MePhosphonate-4O- | 177 |
| 0815 | sense | mUs][fAs][fGs][fA][fG][mA][fU][mG][mA][fA][mU][mU] | |
| | | [mC][fU][mG][mC][mG][mC][mC][mUs][mGs][mG] | |
| Cd68- | Anti- | [MePhosphonate-4O- | 178 |
| 0815 | sense | mUs][fAs][fGs][fA][fG][mA][fU][mG][mA][fA][mU][mU] | |
| | | [mC][fU][mG][mC][mG][mC][mC][mUs][mGs][mG] | |
| Cd68- | Anti- | [MePhosphonate-4O- | 179 |
| 0815 | sense | mUs][fAs][fGs][fA][fG][mA][fU][mG][mA][fA][mU][mU] | |
| | | [mC][fU][mG][mC][mG][mC][mC][mUs][mGs][mG] | |
| Cd68- | Anti- | [MePhosphonate-4O- | 180 |
| 0815 | sense | mUs][fAs][fGs][fA][fG][mA][fU][mG][mA][fA][mU][mU] | |
| | | [mC][fU][mG][mC][mG][mC][mC][mUs][mGs][mG] | |
| Cd68- | Anti- | [MePhosphonate-4O- | 181 |
| 0815 | sense | mUs][fAs][fGs][fA][fG][mA][fU][mG][mA][fA][mU][mU] | |
| | | [mC][fU][mG][mC][mG][mC][mC][mUs][mGs][mG] | |
| Cd68- | Anti- | [MePhosphonate-4O- | 182 |
| 0815 | sense | mUs][fAs][fGs][fA][fG][mA][fU][mG][mA][fA][mU][mU] | |
| | | [mC][fU][mG][mC][mG][mC][mC][mUs][mGs][mG] | |
| Cd68- | Anti- | [MePhosphonate-4O- | 183 |
| 0815 | sense | mUs][fAs][fGs][fA][fG][mA][fU][mG][mA][fA][mU][mU] | |
| | | [mC][fU][mG][mC][mG][mC][mC][mUs][mGs][mG] | |
| Cd68- | Anti- | [MePhosphonate-4O- | 184 |
| 0815 | sense | mUs][fAs][fGs][fA][fG][mA][fU][mG][mA][fA][mU][mU] | |
| | | [mC][fU][mG][mC][mG][mC][mC][mUs][mGs][mG] | |
| Cd68- | Anti- | [MePhosphonate-4O- | 185 |
| 0815 | sense | mUs][fAs][fGs][fA][fG][mA][fU][mG][mA][fA][mU][mU] | |
| | | [mCs][fUs][mG][mC][mG][mC][mC][mUs][mGs][mG] | |
| Cd68- | Anti- | [MePhosphonate-4O- | 186 |
| 0815 | sense | mUs][fAs][fGs][fA][fG][mA][fU][mG][mA][fA][mU][mU] | |
| | | [mCs][fUs][mG][mC][mG][mC][mC][mUs][mGs][mG] | |
| Cd68- | Anti- | [MePhosphonate-4O- | 187 |
| 0815 | sense | mUs][fAs][fGs][fA][fG][mA][fU][mG][mA][fA][mU][mU] | |
| | | [mCs][fUs][mG][mC][mG][mC][mC][mUs][mGs][mG] | |
| Cd68- | Anti- | [MePhosphonate-4O- | 188 |
| 0815 | sense | mUs][fAs][fGs][fA][fG][mA][fU][mG][mA][fA][mU][mU] | |
| | | [mC][fU][mG][mC][mG][mC][mC][mUs][mGs][mG] | |
| Cd68- | Anti- | [MePhosphonate-4O- | 189 |
| 0815 | sense | mUs][fAs][fGs][fA][fG][mA][fU][mG][mA][fA][mU][mU] | |
| | | [mC][fU][mG][mC][mG][mC][fC][mUs][mGs][mG] | |
| Cd68- | Anti- | [MePhosphonate-4O- | 190 |
| 0815 | sense | mUs][fAs][fGs][fA][fG][mA][fU][mG][mA][fA][mU][mU] | |
| | | [mC][fU][mG][mC][mG][mC][mC][mUs][mGs][mG] | |
| Cd68- | Anti- | [MePhosphonate-4O- | 191 |
| 0815 | sense | mUs][fAs][fGs][fA][fG][mA][fU][mG][mA][fA][mU][mU] | |
| | | [mC][fU][mG][mC][mG][mC][fCs][mUs][mGs][mG] | |
| Cd68- | Anti- | [MePhosphonate-4O- | 192 |
| 0815 | sense | mUs][fAs][fGs][fA][fG][mA][fU][mG][mA][fA][mU][mU] | |
| | | [mC][fU][mG][mC][mG][mCs][fC][mUs][mGs][mG] | |
| ALDH2- | Sense | UGAAACUCAGUUUAGCCGAAGGC | 193 |
| 1203 | | | |
| ALDH2- | Sense | TGAAACUCAGUUUAGCCGAAGGC | 194 |
| 1203 | | | |
| ALDH2- | Sense | TGAAACUCAGUUUAGCCGAAGGC | 195 |
| 1203 | | | |
| ALDH2- | Sense | TGAAACUCAGUTTAGCCGAAGGC | 196 |
| 1203 | | | |
| ALDH2- | Sense | GAAACUCAGUUUAGCCGAAGGC | 197 |
| 1203 | | | |
| ALDH2- | Sense | GAAACUCAGUUUAGCCGAAGGC | 198 |
| 1203 | | | |
| ALDH2- | Sense | GAAACUCAGUUUAGCCGAAGGC | 199 |
| 1203 | | | |
| ALDH2- | Sense | GAAACUCAGUTTAGCCGAAGGC | 200 |
| 1203 | | | |
| ALDH2- | Sense | AAACUCAGUUUAGCCGAAGGC | 201 |
| 1203 | | | |
| ALDH2- | Sense | AAACUCAGUUUAGCCGAAGGC | 202 |
| 1203 | | | |
| ALDH2- | Sense | AAACUCAGUUUAGCCGAAGGC | 203 |
| 1203 | | | |
| ALDH2- | Sense | AAACUCAGUTTAGCCGAAGGC | 204 |
| 1203 | | | |
| ALDH2- | Anti- | UAAACUGAGUUUCAUCCACCGG | 205 |
| 1203 | sense | | |
| ALDH2- | Anti- | UAAACUGAGUUUCAUCCACCGG | 206 |
| 1203 | sense | | |
| ALDH2- | Anti- | UAAACUGAGUUUCAUCCACCGG | 207 |
| 1203 | sense | | |
| ALDH2- | Anti- | UAAACUGAGUUUCAUCCACCGG | 208 |
| 1203 | sense | | |
| ALDH2- | Anti- | UAAACUGAGUUUCAUCCACCGG | 209 |
| 1203 | sense | | |
| ALDH2- | Anti- | UAAACUGAGUUUCAUCCACCGG | 210 |
| 1203 | sense | | |
| ALDH2- | Anti- | UAAACUGAGUUUCAUCCACCGG | 211 |
| 1203 | sense | | |
| ALDH2- | Anti- | UAAACUGAGUUUCAUCCACCGG | 212 |
| 1203 | sense | | |
| ALDH2- | Anti- | UAAACUGAGUUUCAUCCACCGG | 213 |
| 1203 | sense | | |
| ALDH2- | Anti- | UAAACUGAGUUUCAUCCACCGG | 214 |
| 1203 | sense | | |
| ALDH2- | Anti- | UAAACUGAGUUUCAUCCACCGG | 215 |
| 1203 | sense | | |
| ALDH2- | Anti- | UAAACUGAGUUUCAUCCACCGG | 216 |
| 1203 | sense | | |
| ALDH2- | Sense | [mUs][fG][[A][fA][fA][mC][mU][mC][mA][mG][mU][mU] | 217 |
| 1203 | | [mU][mA][+G][+C][+C][mG][ademA-GalNAc][ademA- | |
| | | GalNAc][+G][+G][+C] | |
| ALDH2- | Sense | [+Ts][fG][fA][fA][fA][mC][mU][mC][+A][mG][mU][mU] | 218 |
| 1203 | | [mU][mA][+G][+C][+C][mG][ademA-GalNAc][ademA- | |
| | | GalNAc][+G][+G][+C] | |
| ALDH2- | Sense | [+Ts][fG][fA][fA][fA][mC][mU][mC][+A][+G][mU][mU] | 219 |
| 1203 | | [mU][mA][+G][+C][+C][mG][ademA-GalNAc][ademA- | |
| | | GalNAc][+G][+G][+C] | |
| ALDH2- | Sense | [+Ts][fG][fA][fA][fA][mC][mU][mC][+A][+G][mU][+T][+T] | 220 |
| 1203 | | [mA][+G][+C][+C][mG][ademA-GalNAc][ademA- | |
| | | GalNAc][+G][+G][+C] | |
| ALDH2- | Sense | [fGs][fA][fA][fA][mC][mU][mC][mA][mG][mU][mU][mU] | 221 |
| 1203 | | [mA][+G][+C][+C][mG][ademA-GalNAc][ademA- | |
| | | GalNAc][+G][+G][+C] | |
| ALDH2- | Sense | [+Gs][fA][fA][fA][mC][mU][mC][+A][mG][mU][mU][mU] | 222 |
| 1203 | | [mA][+G][+C][+C][mG][ademA-GalNAc][ademA- | |
| | | GalNAc][+G][+G][+C] | |
| ALDH2- | Sense | [+Gs][fA][fA][fA][mC][mU][mC][+A][+G][mU][mU][mU] | 223 |
| 1203 | | [mA][+G][+C][+C][mG][ademA-GalNAc][ademA- | |
| | | GalNAc][+G][+G][+C] | |
| ALDH2- | Sense | [+Gs][[A][[A][fA][mC][mU][mC][+A][+G][mU][+T][+T] | 224 |
| 1203 | | [mA][+G][+C][+C][mG][ademA-GalNAc][ademA- | |
| | | GalNAc][+G][+G][+C] | |
| ALDH2- | Sense | [fAs][fA][fA][mC][mU][mC][mA][mG][mU][mU][mU][mA] | 225 |
| 1203 | | [+G][+C][+C][mG][ademA-GalNAc][ademA- | |
| | | GalNAc][+G][+G][+C] | |
| ALDH2- | Sense | [+As][fA][fA][mC][mU][mC][+A][mG][mU][mU][mU][mA] | 226 |
| 1203 | | [+G][+C][+C][mG][ademA-GalNAc][ademA- | |
| | | GalNAc][+G][+G][+C] | |
| ALDH2- | Sense | [+As][fA][fA][mC][mU][mC][+A][+G][mU][mU][mU][mA] | 227 |
| 1203 | | [+G][+C][+C][mG][ademA-GalNAc][ademA- | |
| | | GalNAc][+G][+G][+C] | |
| ALDH2- | Sense | [+As][fA][fA][mC][mU][mC][+A][+G][mU][+T][+]][mA] | 228 |
| 1203 | | [+G][+C][+C][mG][ademA-GalNAc][ademA- | |
| | | GalNAc][+G][+G][+C] | |
| ALDH2- | Anti- | [MePhosphonate-4O- | 229 |
| 1203 | sense | mUs][fAs][fA][fA][fC][mU][fG][mA][mG][fU][mU][mU] | |
| | | [mCs][fAs][mU][mC][mC][mA][mC][mCs][mGs][mG] | |
| ALDH2- | Anti- | [MePhosphonate-4O- | 230 |
| 1203 | sense | mUs][fAs][fA][fA][fC][mU][fG][mA][mG][fU][mU][mU] | |
| | | [mCs][fAs][mU][mC][mC][mA][mC][mCs][mGs][mG] | |
| ALDH2- | Anti- | [MePhosphonate-4O- | 231 |
| 1203 | sense | mUs][fAs][fA][fA][fC][mU][fG][mA][mG][fU][mU][mU] | |
| | | [mCs][fAs][mU][mC][mC][mA][mC][mCs][mGs][mG] | |
| ALDH2- | Anti- | [MePhosphonate-4O- | 232 |
| 1203 | sense | mUs][fAs][fA][fA][fC][mU][fG][mA][mG][fU][mU][mU] | |
| | | [mCs][fAs][mU][mC][mC][mA][mC][mCs][mGs][mG] | |
| ALDH2- | Anti- | [MePhosphonate-4O- | 233 |
| 1203 | sense | mUs][fAs][fA][fA][fC][mU][fG][mA][mG][fU][mU][mU] | |
| | | [mCs][fAs][mU][mC][mC][mA][mC][mCs][mGs][mG] | |
| ALDH2- | Anti- | [MePhosphonate-4O- | 234 |
| 1203 | sense | mUs][fAs][fA][fA][fC][mU][fG][mA][mG][fU][mU][mU] | |
| | | [mCs][fAs][mU][mC][mC][mA][mC][mCs][mGs][mG] | |
| ALDH2- | Anti- | [MePhosphonate-4O- | 235 |
| 1203 | sense | mUs][fAs][fA][fA][fC][mU][fG][mA][mG][fU][mU][mU] | |
| | | [mCs][fAs][mU][mC][mC][mA][mC][mCs][mGs][mG] | |
| ALDH2- | Anti- | [MePhosphonate-4O- | 236 |
| 1203 | sense | mUs][fAs][fA][fA][fC][mU][fG][mA][mG][fU][mU][mU] | |
| | | [mCs][fAs][mU][mC][mC][mA][mC][mCs][mGs][mG] | |
| ALDH2- | Anti- | [MePhosphonate-4O- | 237 |
| 1203 | sense | mUs][fAs][fA][fA][fC][mU][fG][mA][mG][fU][mU][mU] | |
| | | [mCs][fAs][mU][mC][mC][mA][mC][mCs][mGs][mG] | |
| ALDH2- | Anti- | [MePhosphonate-4O- | 238 |
| 1203 | sense | mUs][fAs][fA][fA][fC][mU][fG][mA][mG][fU][mU][mU] | |
| | | [mCs][fAs][mU][mC][mC][mA][mC][mCs][mGs][mG] | |
| ALDH2- | Anti- | [MePhosphonate-4O- | 239 |
| 1203 | sense | mUs][fAs][fA][fA][fC][mU][fG][mA][mG][fU][mU][mU] | |
| | | [mCs][fAs][mU][mC][mC][mA][mC][mCs][mGs][mG] | |
| ALDH2- | Anti- | [MePhosphonate-4O- | 240 |
| 1203 | sense | mUs][fAs][fA][fA][fC][mU][fG][mA][mG][fU][mU][mU] | |
| | | [mCs][fAs][mU][mC][mC][mA][mC][mCs][mGs][mG] | |
| ALDH2- | Sense | GAUGAAACUCAGUUUA | 241 |
| 1203 | | | |
| ALDH2- | Sense | GAUGAAACUCAGUUUA | 242 |
| 1203 | | | |
| ALDH2- | Sense | GAUGAAACUCAGUUUA | 243 |
| 1203 | | | |
| ALDH2- | Sense | GAUGAAACUCAGUUUA | 244 |
| 1203 | | | |
| ALDH2- | Sense | GAUGAAACUCAGUUUA | 245 |
| 1203 | | | |
| ALDH2- | Sense | GAUGAAACUCAGUUUA | 246 |
| 1203 | | | |
| ALDH2- | Sense | GAUGAAACUCAGUUUA | 247 |
| 1203 | | | |
| ALDH2- | Sense | GAUGAAACUCAGUUUA | 248 |
| 1203 | | | |
| ALDH2- | Sense | GAUGAAACUCAGUUUA | 249 |
| 1203 | | | |
| ALDH2- | Anti- | UAAACUGAGUUUCAUCCACUGG | 250 |
| 1203 | sense | | |
| ALDH2- | Anti- | UAAACUGAGUUUCAUCCACUGG | 251 |
| 1203 | sense | | |
| ALDH2- | Anti- | UAAACUGAGUUUCAUCCACUGG | 252 |
| 1203 | sense | | |
| ALDH2- | Anti- | UAAACUGAGUUUCAUCCACUGG | 253 |
| 1203 | sense | | |
| ALDH2- | Anti- | UAAACUGAGUUUCAUCCACUGG | 254 |
| 1203 | sense | | |
| ALDH2- | Anti- | UAAACUGAGUUUCAUCCACUGG | 255 |
| 1203 | sense | | |
| ALDH2- | Anti- | UAAACUGAGUUUCAUCCACUGG | 256 |
| 1203 | sense | | |
| ALDH2- | Anti- | UAAACUGAGUUUCAUCCACUGG | 257 |
| 1203 | sense | | |
| ALDH2- | Anti- | UAAACUGAGUUUCAUCCACUGG | 258 |
| 1203 | sense | | |
| ALDH2- | Anti- | UAAACUGAGUUUCAUCCACUGG | 259 |
| 1203 | sense | | |
| ALDH2- | Sense | [+Gs][mA][mU][fG][fA][fA][fA][mC][mU][mC][mA][mG] | 260 |
| 1203 | | [mU][mUs][mUs][ademA-C16] | |
| ALDH2- | Sense | [+Gs][mA][mU][fG][fA][fA][fA][mC][mU][mC][+A][mG] | 261 |
| 1203 | | [mU][mUs][mUs][ademA-C16] | |
| ALDH2- | Sense | [+Gs][mA][mU][fG][fA][fA][fA][mC][mU][mC][+A][+G] | 262 |
| 1203 | | [mU][mUs][mUs][ademA-C16] | |
| ALDH2- | Sense | [ademGs- | 263 |
| 1203 | | C16][+A][mU][fG][fA][fA][fA][mC][mU][mC][mA][mG] | |
| | | [mU][mUs][mUs][mA] | |
| ALDH2- | Sense | [ademGs-C16][+A][mU][fG][fA][fA][fA][mC] | 264 |
| 1203 | | [mU][mC][+A][mG][mU][mUs][mUs][mA] | |
| ALDH2- | Sense | [ademGs-C16][+A][mU][fG][fA][fA][fA][mC][mU] | 265 |
| 1203 | | [mC][+A][+G][mU][mUs][mUs][mA] | |
| ALDH2- | Sense | [+Gs][mA][mU][fG][ademA-C16][fA][fA][mC] | 266 |
| 1203 | | [mU][mC][mA][mG][mU][mUs][mUs][mA] | |
| ALDH2- | Sense | [+Gs][mA][mU][fG][ademA-C16][fA][fA][mC][mU][mC] | 267 |
| 1203 | | [+A][mG][mU][mUs][mUs][mA] | |
| ALDH2- | Sense | [+Gs][mA][mU][fG][ademA-C16][fA][fA][mC][mU][mC] | 268 |
| 1203 | | [+A][+G][mU][mUs][mUs][mA] | |
| ALDH2- | Anti- | [MePhosphonate-4O- | 269 |
| 1203 | sense | mUs][fAs][fAs][fA][fC][mU][fG][mA][mG][fU][mU][mU] | |
| | | [mC][fA][mU][mC][mC][mA][mC][mUs][mGs][mG] | |
| ALDH2- | Anti- | [MePhosphonate-4O- | 270 |
| 1203 | sense | mUs][fAs][fAs][fA][fC][mU][fG][mA][mG][fU][mU][mU] | |
| | | [mC][fA][mU][mC][mC][mA][mC][mUs][mGs][mG] | |
| ALDH2- | Anti- | [MePhosphonate-4O- | 271 |
| 1203 | sense | mUs][fAs][fAs][fA][fC][mU][fG][mA][mG][fU][mU][mU] | |
| | | [mC][fA][mU][mC][mC][mA][mC][mUs][mGs][mG] | |
| ALDH2- | Anti- | [MePhosphonate-4O- | 272 |
| 1203 | sense | mUs][fAs][fAs][fA][fC][mU][fG][mA][mG][fU][mU][mU] | |
| | | [mC][fA][mU][mC][mC][mA][mC][mUs][mGs][mG] | |
| ALDH2- | Anti- | [MePhosphonate-4O- | 273 |
| 1203 | sense | mUs][fAs][fAs][fA][fC][mU][fG][mA][mG][fU][mU][mU] | |
| | | [mC][fA][mU][mC][mC][mA][mC][mUs][mGs][mG] | |
| ALDH2- | Anti- | [MePhosphonate-4O- | 274 |
| 1203 | sense | mUs][fAs][fAs][fA][fC][mU][fG][mA][mG][fU][mU][mU] | |
| | | [mC][fA][mU][mC][mC][mA][mC][mUs][mGs][mG] | |
| ALDH2- | Anti- | [MePhosphonate-4O- | 275 |
| 1203 | sense | mUs][fAs][fAs][fA][fC][mU][fG][mA][mG][fU][mU][mU] | |
| | | [mC][fA][mU][mC][mC][mA][mC][mUs][mGs][mG] | |
| ALDH2- | Anti- | [MePhosphonate-4O- | 276 |
| 1203 | sense | mUs][fAs][fAs][fA][fC][mU][fG][mA][mG][fU][mU][mU] | |
| | | [mC][fA][mU][mC][mC][mA][mC][mUs][mGs][mG] | |
| ALDH2- | Anti- | [MePhosphonate-4O- | 277 |
| 1203 | sense | mUs][fAs][fAs][fA][fC][mU][fG][mA][mG][fU][mU][mU] | |
| | | [mC][fA][mU][mC][mC][mA][mC][mUs][mGs][mG] | |
| STAT3- | Sense | AGUUGAAUUAUCAGCUUAAA | 278 |
| 1402 | | | |
| SLC25A1- | Sense | ACCAUCAAGGUGAAGUUCAA | 279 |
| 0597 | | | |
| HMGB1- | Sense | AGAAAAAAAUUGAAAUGUAA | 280 |
| 0932 | | | |
| ALDH2- | Sense | AGUGGAUGAAACUCAGUUUA | 281 |
| 1203 | | | |
| STAT3- | Sense | AGUUGAAUUAUCAGCUUA | 282 |
| 1402 | | | |
| SLC25A1- | Sense | ACCAUCAAGGUGAAGUUC | 283 |
| 0597 | | | |
| HMGB1- | Sense | AGAAAAAAAUUGAAAUGU | 284 |
| 0932 | | | |
| ALDH2- | Sense | AGUGGAUGAAACUCAGUU | 285 |
| 1203 | | | |
| STAT3- | Anti- | UUUAAGCUGAUAAUUCAACUGG | 286 |
| 1402 | sense | | |
| SLC25A1- | Anti- | UUGAACUUCACCUUGAUGGUGG | 287 |
| 0597 | sense | | |
| HMGB1- | Anti- | UUACAUUUCAAUUUUUUUCUGG | 288 |
| 0932 | sense | | |
| ALDH2- | Anti- | UAAACUGAGUUUCAUCCACUGG | 289 |
| 1203 | sense | | |
| STAT3- | Anti- | UUUAAGCUGAUAAUUCAACUGG | 290 |
| 1402 | sense | | |
| SLC25A1- | Anti- | UUGAACUUCACCUUGAUGGUGG | 291 |
| 0597 | sense | | |
| HMGB1- | Anti- | UUACAUUUCAAUUUUUUUCUGG | 292 |
| 0932 | sense | | |
| ALDH2- | Anti- | UAAACUGAGUUUCAUCCACUGG | 293 |
| 1203 | sense | | |
| STAT3- | Sense | [ademAs-C22][mG][mU][mU][mG][mA][mA][fU][fU] | 294 |
| 1402 | | [fA][fU][mC][mA][mG][mC][mU][mU][mAs][mAs][mA] | |
| SLC25A1- | Sense | [ademAs-C22][mC][mC][mA][mU][mC][mA][fA][fG] | 295 |
| 0597 | | [fG][fU][mG][mA][mA][mG][mU][mU][mCs][mAs][mA] | |
| HMGB1- | Sense | [ademAs- | 296 |
| 0932 | | C22][mG][mA][mA][mA][mA][mA][fA][fA][fU][fU][mG] | |
| | | [mA][mA][mA][mU][mG][mUs][mAs][mA] | |
| ALDH2- | Sense | [ademAs-C22][mG][mU][mG][mG][mA][mU][fG][fA] | 297 |
| 1203 | | [fA][fA][mC][mU][mC][mA][mG][mU][mUs][mUs][mA] | |
| STAT3- | Sense | [ademAs-C22][mG][mU][mU][mG][mA][mA][fU][fU] | 298 |
| 1402 | | [[A][fU][mC][mA][mG][mC][mUs][mUs][mA] | |
| SLC25A1- | Sense | [ademAs-C22][mC][mC][mA][mU][mC][mA][fA][fG] | 299 |
| 0597 | | [fG][fU][mG][mA][mA][mG][mUs][mUs][mC] | |
| HMGB1- | Sense | [adem As-C22][mG][mA][mA][mA][mA][mA][fA] | 300 |
| 0932 | | [[A][fU][fU][mG][mA][mA][mA][mUs][mGs][mU] | |
| ALDH2- | Sense | [ademAs-C22][mG][mU][mG][mG][mA][mU][fG] | 301 |
| 1203 | | [fA][fA][fA][mC][mU][mC][mA][mGs][mUs][mU] | |
| STAT3- | Anti- | [MePhosphonate-4O-mUs][fUs][fUs][fA][fA][mG][fC][mU] | 302 |
| 1402 | sense | [mG][fA][mU][mA][mA][fU][mU][mC][mA][mA][mC][mUs | |
| | | ][mGs][mG] | |
| SLC25A1- | Anti- | [MePhosphonate-4O-mUs][fUs][fGs][fA][fA][mC][fU] | 303 |
| 0597 | sense | [mU][mC][fA][mC][mC][mU][fU][mG][mA][mU][mG][mG] | |
| | | [mUs][mGs][mG] | |
| HMGB1- | Anti- | [MePhosphonate-4O- | 304 |
| 0932 | sense | mUs][fUs][fAs][fC][fA][mU][fU][mU][mC][fA][mA][mU] | |
| | | [mU][fU][mU][mU][mU][mU][mC][mUs][mGs][mG] | |
| ALDH2- | Anti- | [MePhosphonate-4O- | 305 |
| 1203 | sense | mUs][fAs][fAs][fA][fC][mU][fG][mA][mG][fU][mU][mU] | |
| | | [mC][fA][mU][mC][mC][mA][mC][mUs][mGs][mG] | |
| STAT3- | Anti- | [MePhosphonate-4O- | 306 |
| 1402 | sense | mUs][fUs][fUs][fA][fA][mG][fC][mU][mG][fA][mU][mA] | |
| | | [mA][fU][mU][mC][mA][mA][mC][mUs][mGs][mG] | |
| SLC25A1- | Anti- | [MePhosphonate-4O- | 307 |
| 0597 | sense | mUs][fUs][fGs][fA][fA][mC][fU][mU][mC][fA][mC][mC] | |
| | | [mU][fU][mG][mA][mU][mG][mG][mUs][mGs][mG] | |
| HMGB1- | Anti- | [MePhosphonate-4O- | 308 |
| 0932 | sense | mUs][fUs][fAs][fC][fA][mU][fU][mU][mC][fA][mA][mU] | |
| | | [mU][fU][mU][mU][mU][mU][mC][mUs][mGs][mG] | |
| ALDH2- | Anti- | [MePhosphonate-4O- | 309 |
| 1203 | sense | mUs][fAs][fAs][fA][fC][mU][fG][mA][mG][fU][mU][mU] | |
| | | [mC][fA][mU][mC][mC][mA][mC][mUs][mGs][mG] | |
| TUBB3- | Sense | AGUGUGAGAAUUGUGACUGAGCAGCCGAAAGGCUG | 310 |
| 0445 | | C | |
| TUBB3- | Sense | GCAGCCGAAAGGCUGCCCAGUGUGAGAAUUGUGAC | 311 |
| 0445 | | UGA | |
| TUBB3- | Sense | GCACGAAAGUGCCCAGUGUGAGAAUUGUGACUGA | 312 |
| 0445 | | | |
| TUBB3- | Sense | GCACGAAAGUGCCCAGUGUGAGAAUUGUGACUGA | 313 |
| 0445 | | | |
| TUBB3- | Sense | GCACGAAAGUGCCCAGUGUGAGAAUUGUGACUGA | 314 |
| 0445 | | | |
| TUBB3- | Sense | GCACUACGGUGCCCAGUGUGAGAAUUGUGACUGA | 315 |
| 0445 | | | |
| TUBB3- | Sense | GCUACGGCCCAGUGUGAGAAUUGUGACUGA | 316 |
| 0445 | | | |
| TUBB3- | Sense | GCUACGGCCCAGUGUGAGAAUUGUGACUGA | 317 |
| 0445 | | | |
| TUBB3- | Sense | GCUACGGCCCAGUGUGAGAAUUGUGACU | 318 |
| 0445 | | | |
| TUBB3- | Sense | GCAGCCGAAAGGCUGCCCAGUGUGAGAAUUGUGAC | 319 |
| 0445 | | UGA | |
| TUBB3- | Sense | GCACGAAAGUGCCCAGUGUGAGAAUUGUGACUGA | 320 |
| 0445 | | | |
| TUBB3- | Sense | GCACGAAAGUGCCCAGUGUGAGAAUUGUGACUGA | 321 |
| 0445 | | | |
| TUBB3- | Sense | GCACGAAAGTGCCCAGUGUGAGAAUUGUGACUGA | 322 |
| 0445 | | | |
| TUBB3- | Sense | GCUACGGCCCAGUGUGAGAAUUGUGACUGA | 323 |
| 0445 | | | |
| TUBB3- | Anti- | UCAGUCACAAUUCUCACACUGG | 324 |
| 0445 | sense | | |
| TUBB3- | Anti- | UCAGUCACAAUUCUCACACUGG | 325 |
| 0445 | sense | | |
| TUBB3- | Anti- | UCAGUCACAAUUCUCACACUGG | 326 |
| 0445 | sense | | |
| TUBB3- | Anti- | UCAGUCACAAUUCUCACACUGG | 327 |
| 0445 | sense | | |
| TUBB3- | Anti- | UCAGUCACAAUUCUCACACUGG | 328 |
| 0445 | sense | | |
| TUBB3- | Anti- | UCAGUCACAAUUCUCACACUGG | 329 |
| 0445 | sense | | |
| TUBB3- | Anti- | UCAGUCACAAUUCUCACACUGG | 330 |
| 0445 | sense | | |
| TUBB3- | Anti- | UCAGUCACAAUUCUCACACUGG | 331 |
| 0445 | sense | | |
| TUBB3- | Anti- | UCAGUCACAAUUCUCACACUGG | 332 |
| 0445 | sense | | |
| TUBB3- | Anti- | UCAGUCACAAUUCUCACACUGG | 333 |
| 0445 | sense | | |
| TUBB3- | Anti- | UCAGUCACAAUUCUCACACUGG | 334 |
| 0445 | sense | | |
| TUBB3- | Anti- | UCAGUCACAAUUCUCACACUGG | 335 |
| 0445 | sense | | |
| TUBB3- | Anti- | UCAGUCACAAUUCUCACACUGG | 336 |
| 0445 | sense | | |
| TUBB3- | Anti- | UCAGUCACAAUUCUCACACUGG | 337 |
| 0445 | sense | | |
| TUBB3- | Sense | [mAs][mG][mU][mG][mU][mG][mA][fG][fA][fA][fU][mU] | 338 |
| 0445 | | [mG][mU][mG][mA][mC][mU][mG][mA][mG][mC][mA][mG] | |
| | | [mC][mC][mG][ademA- | |
| | | C16][mA][mA][mG][mG][mC][mU][mG][mC] | |
| TUBB3- | Sense | [mG][mC][mA][mG][mC][mC][mG][ademA- | 339 |
| 0445 | | C16][mA][mA][mG][mG][mC][mU][mG][mC][mC][mC][mA] | |
| | | [mG][mU][mG][mU][mG][mA][fG][fA][fA][fU][mU][mG] | |
| | | [mU][mG][mA][mC][mUs][mGs][mA] | |
| TUBB3- | Sense | [mG][mC][mA][mC][mG][ademA- | 340 |
| 0445 | | C16][mA][mA][mG][mU][mG][mC][mC][mC][mA][mG][mU] | |
| | | [mG][mU][mG][mA][fG][fA][fA][fU][mU][mG][mU][mG] | |
| | | [mA][mC][mUs][mGs][mA] | |
| TUBB3- | Sense | [mGs][mCs][mA][mC][mG][ademA- | 341 |
| 0445 | | C16][mA][mA][mG][mU][mG][mC][mC][mC][mA][mG][mU] | |
| | | [mG][mU][mG][mA][fG][fA][fA][fU][mU][mG][mU][mG] | |
| | | [mA][mC][mUs][mGs][mA] | |
| TUBB3- | Sense | [mG][mC][mA][mC][mG][mA][mA][mA][mG][mU][mG] | 342 |
| 0445 | | [mC][mC][mC][ademA- | |
| | | C16][mG][mU][mG][mU][mG][mA][fG][fA][fA][fU][mU] | |
| | | [mG][mU][mG][mA][mC][mUs][mGs][mA] | |
| TUBB3- | Sense | [mG][mC][mA][mC][mU][ademA- | 343 |
| 0445 | | C16][mC][mG][mG][mU][mG][mC][mC][mC][mA][mG][mU] | |
| | | [mG][mU][mG][mA][fG][fA][fA][fU][mU][mG][mU][mG] | |
| | | [mA][mC][mUs][mGs][mA] | |
| TUBB3- | Sense | [mG][mC][mU][ademA- | 344 |
| 0445 | | C16][mC][mG][mG][mC][mC][mC][mA][mG][mU][mG][mU] | |
| | | [mG][mA][fG][fA][fA][fU][mU][mG][mU][mG][mA][mC] | |
| | | [mUs][mGs][mA] | |
| TUBB3- | Sense | [+G][mC][mU][ademA- | 345 |
| 0445 | | C16][mC][mG][mG][+C][mC][mC][mA][mG][mU][mG][mU] | |
| | | [mG][mA][fG][fA][fA][fU][mU][mG][mU][mG][mA][mC] | |
| | | [mUs][mGs][mA] | |
| TUBB3- | Sense | [+G][mC][mU][ademA- | 346 |
| 0445 | | C16][mC][mG][mG][+C][mC][mC][mA][mG][mU][mG][mU] | |
| | | [mG][mA][fG][fA][fA][fU][mU][mG][mU][mG][mAs][mCs] | |
| | | [mU] | |
| TUBB3- | Sense | [mG][mC][mA][mG][mC][mC][mG][mA][mA][mA][mG][mG] | 347 |
| 0445 | | [mC][mU][mG][mC][mC][mC][mA][mG][mU][mG][mU] | |
| | | [mG][mA][fG][fA][fA][fU][mU][mG][mU][mG][mA][mC] | |
| | | [mUs][mGs][ademA-C16] | |
| TUBB3- | Sense | [+G][mC][mA][mC][mG][ademA- | 348 |
| 0445 | | C16][mA][mA][mG][mU][mG][+C][mC][mC][mA][mG][mU] | |
| | | [mG][mU][mG][mA][fG][fA][fA][fU][mU][mG][mU][mG] | |
| | | [mA][mC][mUs][mGs][mA] | |
| TUBB3- | Sense | [+G][+C][mA][mC][mG][ademA- | 349 |
| 0445 | | C16][mA][mA][mG][mU][+G][+C][mC][mC][mA][mG][mU] | |
| | | [mG][mU][mG][mA][fG][fA][fA][fU][mU][mG][mU][mG] | |
| | | [mA][mC][mUs][mGs][mA] | |
| TUBB3- | Sense | [+G][+C][+A][mC][mG][ademA- | 350 |
| 0445 | | C16][mA][mA][mG][+T][+G][+C][mC][mC][mA][mG][mU] | |
| | | [mG][mU][mG][mA][fG][fA][fA][fU][mU][mG][mU][mG] | |
| | | [mA][mC][mUs][mGs][mA] | |
| TUBB3- | Sense | [+G][+C][mU][ademA- | 351 |
| 0445 | | C16][mC][mG][+G][+C][mC][mC][mA][mG][mU][mG][mU] | |
| | | [mG][mA][fG][fA][fA][fU][mU][mG][mU][mG][mA][mC] | |
| | | [mUs][mGs][mA] | |
| TUBB3- | Anti- | [MePhosphonate-4O- | 352 |
| 0445 | sense | mUs][fCs][fAs][fG][fU][mC][fA][mC][mA][fA][mU][mU] | |
| | | [mC][fU][mC][mA][mC][mA][mC][mUs][mGs][mG] | |
| TUBB3- | Anti- | [MePhosphonate-4O- | 353 |
| 0445 | sense | mUs][fCs][fAs][fG][fU][mC][fA][mC][mA][fA][mU][mU] | |
| | | [mC][fU][mC][mA][mC][mA][mC][mUs][mGs][mG] | |
| TUBB3- | Anti- | [MePhosphonate-4O- | 354 |
| 0445 | sense | mUs][fCs][fAs][fG][fU][mC][fA][mC][mA][fA][mU][mU] | |
| | | [mC][fU][mC][mA][mC][mA][mC][mUs][mGs][mG] | |
| TUBB3- | Anti- | [MePhosphonate-4O- | 355 |
| 0445 | sense | mUs][fCs][fAs][fG][fU][mC][fA][mC][mA][fA][mU][mU] | |
| | | [mC][fU][mC][mA][mC][mA][mC][mUs][mGs][mG] | |
| TUBB3- | Anti- | [MePhosphonate-4O- | 356 |
| 0445 | sense | mUs][fCs][fAs][fG][fU][mC][fA][mC][mA][fA][mU][mU] | |
| | | [mC][fU][mC][mA][mC][mA][mC][mUs][mGs][mG] | |
| TUBB3- | Anti- | [MePhosphonate-4O- | 357 |
| 0445 | sense | mUs][fCs][fAs][fG][fU][mC][fA][mC][mA][fA][mU][mU] | |
| | | [mC][fU][mC][mA][mC][mA][mC][mUs][mGs][mG] | |
| TUBB3- | Anti- | [MePhosphonate-4O- | 358 |
| 0445 | sense | mUs][fCs][fAs][fG][fU][mC][fA][mC][mA][fA][mU][mU] | |
| | | [mC][fU][mC][mA][mC][mA][mC][mUs][mGs][mG] | |
| TUBB3- | Anti- | [MePhosphonate-4O- | 359 |
| 0445 | sense | mUs][fCs][fAs][fG][fU][mC][fA][mC][mA][fA][mU][mU] | |
| | | [mC][fU][mC][mA][mC][mA][mC][mUs][mGs][mG] | |
| TUBB3- | Anti- | [MePhosphonate-4O- | 360 |
| 0445 | sense | mUs][fCs][fAs][fG][fU][mC][fA][mC][mA][fA][mU][mU] | |
| | | [mC][fU][mC][mA][mC][mA][mC][mUs][mGs][mG] | |
| TUBB3- | Anti- | [MePhosphonate-4O- | 361 |
| 0445 | sense | mUs][fCs][fAs][fG][fU][mC][fA][mC][mA][fA][mU][mU] | |
| | | [mC][fU][mC][mA][mC][mA][mC][mUs][mGs][mG] | |
| TUBB3- | Anti- | [MePhosphonate-4O- | 362 |
| 0445 | sense | mUs][fCs][fAs][fG][fU][mC][fA][mC][mA][fA][mU][mU] | |
| | | [mC][fU][mC][mA][mC][mA][mC][mUs][mGs][mG] | |
| TUBB3- | Anti- | [MePhosphonate-4O- | 363 |
| 0445 | sense | mUs][fCs][fAs][fG][fU][mC][fA][mC][mA][fA][mU][mU] | |
| | | [mC][fU][mC][mA][mC][mA][mC][mUs][mGs][mG] | |
| TUBB3- | Anti- | [MePhosphonate-4O- | 364 |
| 0445 | sense | mUs][fCs][fAs][fG][fU][mC][fA][mC][mA][fA][mU][mU] | |
| | | [mC][fU][mC][mA][mC][mA][mC][mUs][mGs][mG] | |
| TUBB3- | Anti- | [MePhosphonate-4O- | 365 |
| 0445 | sense | mUs][fCs][fAs][fG][fU][mC][fA][mC][mA][fA][mU][mU] | |
| | | [mC][fU][mC][mA][mC][mA][mC][mUs][mGs][mG] | |
| TUBB3- | Sense | GCUACGGCCCAGUGUGAGAAUUGUGACUGA | 366 |
| 0445 | | | |
| TUBB3- | Sense | GCUACGGCCCAGUGUGAGAAUUGUGACUGA | 367 |
| 0445 | | | |
| TUBB3- | Sense | GCUACGGCCCAGUGUGAGAAUUGUGACU | 368 |
| 0445 | | | |
| TUBB3- | Sense | GCUACGGCCCAGUGUGAGAAUUGUGACU | 369 |
| 0445 | | | |
| TUBB3- | Sense | AGUGUGAGAAUUGUGACU | 370 |
| 0445 | | | |
| TUBB3- | Sense | AGUGUGAGAAUUGUGACU | 371 |
| 0445 | | | |
| TUBB3- | Sense | AGUGUGAGAAUUGUGACUGA | 372 |
| 0445 | | | |
| TUBB3- | Anti- | UCAGUCACAAUUCUCACACUGG | 373 |
| 0445 | sense | | |
| TUBB3- | Anti- | UCAGUCACAAUUCUCACACUGG | 374 |
| 0445 | sense | | |
| TUBB3- | Anti- | UCAGUCACAAUUCUCACACUGG | 375 |
| 0445 | sense | | |
| TUBB3- | Anti- | AGUCACAAUUCUCACACUGG | 376 |
| 0445 | sense | | |
| TUBB3- | Anti- | UCAGUCACAAUUCUCACACUGG | 377 |
| 0445 | sense | | |
| TUBB3- | Anti- | AGUCACAAUUCUCACACUGG | 378 |
| 0445 | sense | | |
| TUBB3- | Anti- | UCAGUCACAAUUCUCACACUGG | 379 |
| 0445 | sense | | |
| TUBB3- | Sense | [mG][mC][mU][ademA- | 380 |
| 0445 | | C16][mC][mG][mG][mC][mC][mC][mA][mG][mU][mG][mU] | |
| | | [mG][mA][fG][fA][fA][fU][mU][mG][mU][mG][mA][mC] | |
| | | [mUs][mGs][mA] | |
| TUBB3- | Sense | [+G][mC][mU][ademA-C16][mC][mG][mG][+C][mC] | 381 |
| 0445 | | [mC][mA][mG][mU][mG][mU][mG][mA][fG][fA][fA][fU] | |
| | | [mU][mG][mU][mG][mA][mC][mUs][mGs][mA] | |
| TUBB3- | Sense | [+G][mC][mU][ademA-C16][mC][mG][mG][+C] | 382 |
| 0445 | | [mC][mC][mA][mG][mU][mG][mU][mG][mA][fG][fA][fA] | |
| | | [fU][mU][mG][mU][mG][mAs][mCs][mU] | |
| TUBB3- | Sense | [+G][mC][mU][ademA-C16][mC][mG][mG][+C] | 383 |
| 0445 | | [mC][mC][mA][mG][mU][mG][mU][mG][mA][fG][fA][fA] | |
| | | [fU][mU][mG][mU][mG][mAs][mCs][mU] | |
| TUBB3- | Sense | [ademAs-C16][mG][mU][mG][mU][mG][mA][fG] | 384 |
| 0445 | | [fA][fA][fU][mU][mG][mU][mG][mAs][mCs][mU] | |
| TUBB3- | Sense | [ademAs-C16][mG][mU][mG][mU][mG][mA][fG] | 385 |
| 0445 | | [fA][fA][fU][mU][mG][mU][mG][mAs][mCs][mU] | |
| TUBB3- | Sense | [ademAs-C16][mG][mU][mG][mU][mG][mA][fG][fA] | 386 |
| 0445 | | [fA][fU][mU][mG][mU][mG][mA][mC][mUs][mGs][mA] | |
| TUBB3- | Anti- | [MePhosphonate-4O- | 387 |
| 0445 | sense | mUs][fCs][fAs][fG][fU][mC][fA][mC][mA][fA][mU][mU] | |
| | | [mC][fU][mC][mA][mC][mA][mC][mUs][mGs][mG] | |
| TUBB3- | Anti- | [MePhosphonate-4O- | 388 |
| 0445 | sense | mUs][fCs][fAs][fG][fU][mC][fA][mC][mA][fA][mU][mU] | |
| | | [mC][fU][mC][mA][mC][mA][mC][mUs][mGs][mG] | |
| TUBB3- | Anti- | [MePhosphonate-4O- | 389 |
| 0445 | sense | mUs][fCs][fAs][fG][fU][mC][fA][mC][mA][fA][mU][mU] | |
| | | [mC][fU][mC][mA][mC][mA][mC][mUs][mGs][mG] | |
| TUBB3- | Anti- | [fAs][fG][fU][mC][fA][mC][mA][fA][mU][mU][mC][fU][mC] | 390 |
| 0445 | sense | [mA][mC][mA][mC][mUs][mGs][mG] | |
| TUBB3- | Anti- | [MePhosphonate-4O- | 391 |
| 0445 | sense | mUs][fCs][fAs][fG][fU][mC][fA][mC][mA][fA][mU][mU] | |
| | | [mC][fU][mC][mA][mC][mA][mC][mUs][mGs][mG] | |
| TUBB3- | Anti- | [fAs][fG][fU][mC][fA][mC][mA][fA][mU][mU][mC][fU][mC] | 392 |
| 0445 | sense | [mA][mC][mA][mC][mUs][mGs][mG] | |
| TUBB3- | Anti- | [MePhosphonate-4O- | 393 |
| 0445 | sense | mUs][fCs][fAs][fG][fU][mC][fA][mC][mA][fA][mU][mU] | |
| | | [mC][fU][mC][mA][mC][mA][mC][mUs][mGs][mG] | |
| TUBB3- | Sense | AGUGUGAGAAUUGUGACUGA | 394 |
| 0445 | | | |
| TUBB3- | Sense | AGUGUGAGAAUUGUGACUG | 395 |
| 0445 | | | |
| TUBB3- | Sense | AGUGUGAGAAUUGUGACU | 396 |
| 0445 | | | |
| TUBB3- | Sense | AGUGUGAGAAUUGUGAC | 397 |
| 0445 | | | |
| TUBB3- | Sense | AGUGUGAGAAUUGUGA | 398 |
| 0445 | | | |
| TUBB3- | Sense | AGUGUGAGAAUUGUG | 399 |
| 0445 | | | |
| TUBB3- | Sense | AGUGUGAGAAUUGU | 400 |
| 0445 | | | |
| TUBB3- | Sense | AGUGUGAGAAUUG | 401 |
| 0445 | | | |
| TUBB3- | Sense | AGUGUGAGAAUU | 402 |
| 0445 | | | |
| TUBB3- | Sense | AGUGUGAGAAUUGUGA | 403 |
| 0445 | | | |
| TUBB3- | Sense | AGUGUGAGAAUUGUG | 404 |
| 0445 | | | |
| TUBB3- | Anti- | UCAGUCACAAUUCUCACACUGG | 405 |
| 0445 | sense | | |
| TUBB3- | Anti- | UCAGUCACAAUUCUCACACUGG | 406 |
| 0445 | sense | | |
| TUBB3- | Anti- | UCAGUCACAAUUCUCACACUGG | 407 |
| 0445 | sense | | |
| TUBB3- | Anti- | UCAGUCACAAUUCUCACACUGG | 408 |
| 0445 | sense | | |
| TUBB3- | Anti- | UCAGUCACAAUUCUCACACUGG | 409 |
| 0445 | sense | | |
| TUBB3- | Anti- | UCAGUCACAAUUCUCACACUGG | 410 |
| 0445 | sense | | |
| TUBB3- | Anti- | UCAGUCACAAUUCUCACACUGG | 411 |
| 0445 | sense | | |
| TUBB3- | Anti- | UCAGUCACAAUUCUCACACUGG | 412 |
| 0445 | sense | | |
| TUBB3- | Anti- | UCAGUCACAAUUCUCACACUGG | 413 |
| 0445 | sense | | |
| TUBB3- | Anti- | UCAGUCACAAUUCUCACACUGG | 414 |
| 0445 | sense | | |
| TUBB3- | Anti- | UCAGUCACAAUUCUCACACUGG | 415 |
| 0445 | sense | | |
| TUBB3- | Sense | [ademAs-C16][mG][mU][mG][mU][mG][mA][fG][fA] | 416 |
| 0445 | | [fA][fU][mU][mG][mU][mG][mA][mC][mUs][mGs][mA] | |
| TUBB3- | Sense | [ademAs-C16][mG][mU][mG][mU][mG][mA][fG][A] | 417 |
| 0445 | | [fA][fU][mU][mG][mU][mG][mA][mCs][mUs][mG] | |
| TUBB3- | Sense | [ademAs-C16][mG][mU][mG][mU][mG][mA][fG][fA] | 418 |
| 0445 | | [fA][fU][mU][mG][mU][mG][mAs][mCs][mU] | |
| TUBB3- | Sense | [ademAs-C16][mG][mU][mG][mU][mG][mA][fG] | 419 |
| 0445 | | [fA][fA][fU][mU][mG][mU][mGs][mAs][mC] | |
| TUBB3- | Sense | [ademAs-C16][mG][mU][mG][mU][mG][mA][fG] | 420 |
| 0445 | | [[A][fA][fU][mU][mG][mUs][mGs][mA] | |
| TUBB3- | Sense | [ademAs-C16][mG][mU][mG][mU][mG][mA][fG][fA] | 421 |
| 0445 | | [fA][fU][mU][mGs][mUs][mG] | |
| TUBB3- | Sense | [ademAs-C16][mG][mU][mG][mU][mG][mA][fG][fA] | 422 |
| 0445 | | [fA][fU][mUs][mGs][mU] | |
| TUBB3- | Sense | [ademAs-C16][mG][mU][mG][mU][mG][mA][fG][fA] | 423 |
| 0445 | | [fA][fUs][mUs][mG] | |
| TUBB3- | Sense | [ademAs-C16][mG][mU][mG][mU][mG][mA][G][fA] | 424 |
| 0445 | | [fAs][fUs][mU] | |
| TUBB3- | Sense | [ademAs-C16][mG][mU][mG][mU][mG][mA][fG][fA] | 425 |
| 0445 | | [fA][fU][mU][mG][mUs][mGs][mA] | |
| TUBB3- | Sense | [ademAs-C16][mG][mU][mG][mU][mG][mA][fG][fA] | 426 |
| 0445 | | [fA][fU][mU][mGs][mUs][mG] | |
| TUBB3- | Anti- | [MePhosphonate-4O- | 427 |
| 0445 | sense | mUs][fCs][fAs][fG][fU][mC][fA][mC][mA][fA][mU][mU] | |
| | | [mC][fU][mC][mA][mC][mA][mC][mUs][mGs][mG] | |
| TUBB3- | Anti- | [MePhosphonate-4O- | 428 |
| 0445 | sense | mUs][fCs][fAs][fG][fU][mC][fA][mC][mA][fA][mU][mU] | |
| | | [mC][fU][mC][mA][mC][mA][mC][mUs][mGs][mG] | |
| TUBB3- | Anti- | [MePhosphonate-4O- | 429 |
| 0445 | sense | mUs][fCs][fAs][fG][fU][mC][fA][mC][mA][fA][mU][mU] | |
| | | [mC][fU][mC][mA][mC][mA][mC][mUs][mGs][mG] | |
| TUBB3- | Anti- | [MePhosphonate-4O- | 430 |
| 0445 | sense | mUs][fCs][fAs][fG][fU][mC][fA][mC][mA][fA][mU][mU] | |
| | | [mC][fU][mC][mA][mC][mA][mC][mUs][mGs][mG] | |
| TUBB3- | Anti- | [MePhosphonate-4O- | 431 |
| 0445 | sense | mUs][fCs][fAs][fG][fU][mC][fA][mC][mA][fA][mU][mU] | |
| | | [mC][fU][mC][mA][mC][mA][mC][mUs][mGs][mG] | |
| TUBB3- | Anti- | [MePhosphonate-4O- | 432 |
| 0445 | sense | mUs][fCs][fAs][fG][fU][mC][fA][mC][mA][fA][mU][mU] | |
| | | [mC][fU][mC][mA][mC][mA][mC][mUs][mGs][mG] | |
| TUBB3- | Anti- | [MePhosphonate-4O- | 433 |
| 0445 | sense | mUs][fCs][fAs][fG][fU][mC][fA][mC][mA][fA][mU][mU] | |
| | | [mC][fU][mC][mA][mC][mA][mC][mUs][mGs][mG] | |
| TUBB3- | Anti- | [MePhosphonate-4O- | 434 |
| 0445 | sense | mUs][fCs][fAs][fG][fU][mC][fA][mC][mA][fA][mU][mU] | |
| | | [mC][fU][mC][mA][mC][mA][mC][mUs][mGs][mG] | |
| TUBB3- | Anti- | [MePhosphonate-4O- | 435 |
| 0445 | sense | mUs][fCs][fAs][fG][fU][mC][fA][mC][mA][fA][mU][mU] | |
| | | [mC][fU][mC][mA][mC][mA][mC][mUs][mGs][mG] | |
| TUBB3- | Anti- | [MePhosphonate-4O- | 436 |
| 0445 | sense | mUs][fCs][fAs][fGs][fU][mC][fA][mC][mA][fA][mU][mU] | |
| | | [mC][fU][mC][mA][mC][mA][mC][mUs][mGs][mG] | |
| TUBB3- | Anti- | [MePhosphonate-4O- | 437 |
| 0445 | sense | mUs][fCs][fAs][fGs][fUs][mC][fA][mC][mA][fA][mU][mU] | |
| | | [mC][fU][mC][mA][mC][mA][mC][mUs][mGs][mG] | |
| TUBB3- | Sense | AGUGUGAGAAUUGUGACUGA | 438 |
| 0445 | | | |
| TUBB3- | Sense | AGUGUGAGAAUUGUGACTGA | 439 |
| 0445 | | | |
| TUBB3- | Sense | AGUGUGAGAAUUGUGACTG | 440 |
| 0445 | | | |
| TUBB3- | Sense | AGUGUGAGAAUUGUGACT | 441 |
| 0445 | | | |
| TUBB3- | Sense | AGUGUGAGAAUUGUGAC | 442 |
| 0445 | | | |
| TUBB3- | Sense | AGUGUGAGAAUUGUGA | 443 |
| 0445 | | | |
| TUBB3- | Sense | AGUGUGAGAAUUGUG | 444 |
| 0445 | | | |
| TUBB3- | Sense | AGUGUGAGAAUUGU | 445 |
| 0445 | | | |
| TUBB3- | Sense | AGUGUGAGAAUUG | 446 |
| 0445 | | | |
| TUBB3- | Sense | AGUGUGAGAAUU | 447 |
| 0445 | | | |
| TUBB3- | Sense | AGUGUGAGAAUUGUGA | 448 |
| 0445 | | | |
| TUBB3- | Anti- | UCAGUCACAAUUCUCACACUGG | 449 |
| 0445 | sense | | |
| TUBB3- | Anti- | UCAGUCACAAUUCUCACACUGG | 450 |
| 0445 | sense | | |
| TUBB3- | Anti- | UCAGUCACAAUUCUCACACUGG | 451 |
| 0445 | sense | | |
| TUBB3- | Anti- | UCAGUCACAAUUCUCACACUGG | 452 |
| 0445 | sense | | |
| TUBB3- | Anti- | UCAGUCACAAUUCUCACACUGG | 453 |
| 0445 | sense | | |
| TUBB3- | Anti- | UCAGUCACAAUUCUCACACUGG | 454 |
| 0445 | sense | | |
| TUBB3- | Anti- | UCAGUCACAAUUCUCACACUGG | 455 |
| 0445 | sense | | |
| TUBB3- | Anti- | UCAGUCACAAUUCUCACACUGG | 456 |
| 0445 | sense | | |
| TUBB3- | Anti- | UCAGUCACAAUUCUCACACUGG | 457 |
| 0445 | sense | | |
| TUBB3- | Anti- | UCAGUCACAAUUCUCACACUGG | 458 |
| 0445 | sense | | |
| TUBB3- | Anti- | UCAGUCACAAUUCUCACACUGG | 459 |
| 0445 | sense | | |
| TUBB3- | Sense | [ademAs-C16][mG][mU][mG][mU][mG][mA][fG][fA] | 460 |
| 0445 | | [fA][fU][mU][mG][mU][mG][mA][mC][mUs][mGs][mA] | |
| TUBB3- | Sense | [ademAs-C16][+G][mU][mG][mU][mG][mA][fG] | 46 |
| 0445 | | [fA][fA][fU][mU][mG][mU][+G][+A][mC][+Ts][+Gs][mA] | |
| TUBB3- | Sense | [ademAs-C16][+G][mU][mG][mU][mG][mA][fG] | 462 |
| 0445 | | [fA][fA][fU][mU][mG][mU][+G][+A][mCs][+Ts][+G] | |
| TUBB3- | Sense | [ademAs-C16][+G][mU][mG][mU][mG][mA][fG][fA] | 463 |
| 0445 | | [fA][fU][mU][mG][mU][+G][+As][mCs][+T] | |
| TUBB3- | Sense | [ademAs-C16][+G][mU][mG][mU][mG][mA][fG][fA] | 464 |
| 0445 | | [fA][fU][mU][mG][mU][+Gs][+As][mC] | |
| TUBB3- | Sense | [ademAs-C16][+G][mU][mG][mU][mG][mA][fG][fA] | 465 |
| 0445 | | [fA][fU][mU][mG][mUs][+Gs][+A] | |
| TUBB3- | Sense | [adem As-C16][+G][mU][mG][mU][mG][mA][fG][fA] | 466 |
| 0445 | | [fA][fU][mU][mGs][mUs][+G] | |
| TUBB3- | Sense | [ademAs-C16][+G][mU][mG][mU][mG][mA][fG][fA] | 467 |
| 0445 | | [fA][fU][mUs][mGs][mU] | |
| TUBB3- | Sense | [ademAs-C16][+G][mU][mG][mU][mG][mA][fG][fA] | 468 |
| 0445 | | [fA][fUs][mUs][mG] | |
| TUBB3- | Sense | [ademAs-C16][+G][mU][mG][mU][mG][mA][fG][fA] | 469 |
| 0445 | | [fAs][fUs][mU] | |
| TUBB3- | Sense | [ademAs-C16][+G][mU][mG][mU][mG][mA][fG][A] | 470 |
| 0445 | | [fA][fU][mU][mG][mUs][+Gs][+A] | |
| TUBB3- | Anti- | [MePhosphonate-4O- | 471 |
| 0445 | sense | mUs][fCs][fAs][fG][fU][mC][fA][mC][mA][fA][mU][mU] | |
| | | [mC][fU][mC][mA][mC][mA][mC][mUs][mGs][mG] | |
| TUBB3- | Anti- | [MePhosphonate-4O- | 472 |
| 0445 | sense | mUs][fCs][fAs][fG][fU][mC][fA][mC][mA][fA][mU][mU] | |
| | | [mC][fU][mC][mA][mC][mA][mC][mUs][mGs][mG] | |
| TUBB3- | Anti- | [MePhosphonate-4O- | 473 |
| 0445 | sense | mUs][fCs][fAs][fG][fU][mC][fA][mC][mA][fA][mU][mU] | |
| | | [mC][fU][mC][mA][mC][mA][mC][mUs][mGs][mG] | |
| TUBB3- | Anti- | [MePhosphonate-4O- | 474 |
| 0445 | sense | mUs][fCs][fAs][fG][fU][mC][fA][mC][mA][fA][mU][mU] | |
| | | [mC][fU][mC][mA][mC][mA][mC][mUs][mGs][mG] | |
| TUBB3- | Anti- | [MePhosphonate-4O- | 475 |
| 0445 | sense | mUs][fCs][fAs][fG][fU][mC][fA][mC][mA][fA][mU][mU] | |
| | | [mC][fU][mC][mA][mC][mA][mC][mUs][mGs][mG] | |
| TUBB3- | Anti- | [MePhosphonate-4O- | 476 |
| 0445 | sense | mUs][fCs][fAs][fG][fU][mC][fA][mC][mA][fA][mU][mU] | |
| | | [mC][fU][mC][mA][mC][mA][mC][mUs][mGs][mG] | |
| TUBB3- | Anti- | [MePhosphonate-4O- | 477 |
| 0445 | sense | mUs][fCs][fAs][fG][fU][mC][fA][mC][mA][fA][mU][mU] | |
| | | [mC][fU][mC][mA][mC][mA][mC][mUs][mGs][mG] | |
| TUBB3- | Anti- | [MePhosphonate-4O- | 478 |
| 0445 | sense | mUs][fCs][fAs][fG][fU][mC][fA][mC][mA][fA][mU][mU] | |
| | | [mC][fU][mC][mA][mC][mA][mC][mUs][mGs][mG] | |
| TUBB3- | Anti- | [MePhosphonate-4O- | 479 |
| 0445 | sense | mUs][fCs][fAs][fG][fU][mC][fA][mC][mA][fA][mU][mU] | |
| | | [mC][fU][mC][mA][mC][mA][mC][mUs][mGs][mG] | |
| TUBB3- | Anti- | [MePhosphonate-4O- | 480 |
| 0445 | sense | mUs][fCs][fAs][fG][fU][mC][fA][mC][mA][fA][mU][mU] | |
| | | [mC][fU][mC][mA][mC][mA][mC][mUs][mGs][mG] | |
| TUBB3- | Anti- | [MePhosphonate-4O- | 481 |
| 0445 | sense | mUs][fCs][fAs][fGs][fU][mC][fA][mC][mA][fA][mU][mU] | |
| | | [mC][fU][mC][mA][mC][mA][mC][mUs][mGs][mG] | |
| RTN4- | Sense | AGUUGACUUAUUUAGUGAUA | 482 |
| 2481 | | | |
| RTN4- | Sense | ACUUAUUUAGUGAUA | 483 |
| 2481 | | | |
| RTN4- | Sense | AGUUGACUUAUUUAGUGA | 484 |
| 2481 | | | |
| RTN4- | Sense | ACUUAUUUAGUGA | 485 |
| 2481 | | | |
| RTN4- | Sense | AGUUGACUUAUUUAGUGA | 486 |
| 2481 | | | |
| RTN4- | Sense | AGUUGACUUAUUUAGUGA | 487 |
| 2481 | | | |
| RTN4- | Sense | ACUUAUUUAGUGAUA | 488 |
| 2481 | | | |
| RTN4- | Sense | GCUACGGCCCAGUUGACUUAUUUAGUGA | 489 |
| 2481 | | | |
| RTN4- | Sense | GCUACGGCCCAGUUGACUUAUUUAGUGA | 490 |
| 2481 | | | |
| RTN4- | Sense | AGUUGACUUAUUUAGTGAUA | 491 |
| 2481 | | | |
| RTN4- | Sense | ACUUAUUUAGTGAUA | 492 |
| 2481 | | | |
| RTN4- | Anti- | UAUCACUAAAUAAGUCAACUGG | 493 |
| 2481 | Sense | | |
| RTN4- | Anti- | UAUCACUAAAUAAGUCAACUGG | 494 |
| 2481 | Sense | | |
| RTN4- | Anti- | UAUCACUAAAUAAGUCAACUGG | 495 |
| 2481 | Sense | | |
| RTN4- | Anti- | UAUCACUAAAUAAGUCAACUGG | 496 |
| 2481 | Sense | | |
| RTN4- | Anti- | UAUCACUAAAUAAGUCAACUGG | 497 |
| 2481 | Sense | | |
| RTN4- | Anti- | UAUCACUAAAUAAGUCAACUGG | 498 |
| 2481 | Sense | | |
| RTN4- | Anti- | UAUCACUAAAUAAGUCAACUGG | 499 |
| 2481 | Sense | | |
| RTN4- | Anti- | UAUCACUAAAUAAGUCAACUGG | 500 |
| 2481 | Sense | | |
| RTN4- | Anti- | UAUCACUAAAUAAGUCAACUGG | 501 |
| 2481 | Sense | | |
| RTN4- | Anti- | UAUCACUAAAUAAGUCAACUGG | 502 |
| 2481 | Sense | | |
| RTN4- | Anti- | UAUCACUAAAUAAGUCAACUGG | 503 |
| 2481 | Sense | | |
| RTN4- | Sense | [ademAs-C16][mG][mU][mU][mG][mA][mC][fU][fU] | 504 |
| 2481 | | [fA][fU][mU][mU][mA][mG][mU][mG][mAs][mUs][mA] | |
| RTN4- | Sense | [ademAs-C16][mC][fU][fU][fA][fU][mU][mU][mA] | 505 |
| 2481 | | [mG][mU][mG][mAs][mUs][mA] | |
| RTN4- | Sense | [ademAs-C16][mG][mU][mU][mG][mA][mC][fU] | 506 |
| 2481 | | [fU][fA][fU][mU][mU][mA][mG][mUs][mGs][mA] | |
| RTN4- | Sense | [ademAs-C16][mC][fU][fU][fA][fU][mU][mU] | 507 |
| 2481 | | [mA][mG][mUs][mGs][mA] | |
| RTN4- | Sense | [ademAs-C18][mG][mU][mU][mG][mA][mC][fU][fU] | 508 |
| 2481 | | [fA][fU][mU][mU][mA][mG][mUs][mGs][mA] | |
| RTN4- | Sense | [ademAs-C22][mG][mU][mU][mG][mA][mC][fU] | 509 |
| 2481 | | [fU][fA][fU][mU][mU][mA][mG][mUs][mGs][mA] | |
| RTN4- | Sense | [ademAs-C16][mC][fU][fU][fA][fU][mU][mU][mA] | 510 |
| 2481 | | [mG][mU][mG][mAs][mUs][mA] | |
| RTN4- | Sense | [+G][mCs][mUs][ademAs-C16][mCs][mGs][mGs][+C][mC] | 511 |
| 2481 | | [mC][mA][mG][mU][mU][mG][mA][mC][fU][fU][fA][fU] | |
| | | [mU][mU][mA][mG][mUs][mGs][mA] | |
| RTN4- | Sense | [+G][mCs][mUs][mAs][mCs][mGs][mGs][+C][mC][mC][mA] | 512 |
| 2481 | | [mG][mU][mU][mG][mA][mC][fU][fU][fA][fU][mU][mU] | |
| | | [mA][mG][mUs][mGs][mA] | |
| RTN4- | Sense | [ademAs-C16][+G][mU][mU][mG][mA][mC][fU] | 513 |
| 2481 | | [fU][fA][fU][mU][mU][mA][+G][+T][mG][mAs][mUs][mA] | |
| RTN4- | Sense | [ademAs-C16][+C][fU][fU][fA][fU][mU][mU] | 514 |
| 2481 | | [mA][+G][+T][mG][mAs][mUs][mA] | |
| RTN4- | Anti- | [MePhosphonate-4O- | 515 |
| 2481 | Sense | mUs][fAs][fUs][fC][fA][mC][fU][mA][mA][fA][mU][mA] | |
| | | [mA][fG][mU][mC][mA][mA][mC][mUs][mGs][mG] | |
| RTN4- | Anti- | [MePhosphonate-4O- | 516 |
| 2481 | Sense | mUs][fAs][fUs][fC][fA][mC][fU][mA][mA][fA][mU][mA] | |
| | | [mA][fG][mU][mC][mA][mA][mC][mUs][mGs][mG] | |
| RTN4- | Anti- | [MePhosphonate-4O- | 517 |
| 2481 | Sense | mUs][fAs][fUs][fC][fA][mC][fU][mA][mA][fA][mU][mA] | |
| | | [mA][fG][mU][mC][mA][mA][mC][mUs][mGs][mG] | |
| RTN4- | Anti- | [MePhosphonate-4O- | 518 |
| 2481 | Sense | mUs][fAs][fUs][fC][fA][mC][fU][mA][mA][fA][mU][mA] | |
| | | [mA][fG][mU][mC][mA][mA][mC][mUs][mGs][mG] | |
| RTN4- | Anti- | [MePhosphonate-4O- | 519 |
| 2481 | Sense | mUs][fAs][fUs][fC][fA][mC][fU][mA][mA][fA][mU][mA] | |
| | | [mA][fG][mU][mC][mA][mA][mC][mUs][mGs][mG] | |
| RTN4- | Anti- | [MePhosphonate-4O- | 520 |
| 2481 | Sense | mUs][fAs][fUs][fC][fA][mC][fU][mA][mA][fA][mU][mA] | |
| | | [mA][fG][mU][mC][mA][mA][mC][mUs][mGs][mG] | |
| RTN4- | Anti- | [MePhosphonate-4O- | 521 |
| 2481 | Sense | mUs][fAs][fUs][fC][fA][mC][fU][mA][mA][fA][mU][mA] | |
| | | [mA][fGs][mUs][mCs][mAs][mAs][mCs][mUs][mGs][mG] | |
| RTN4- | Anti- | [MePhosphonate-4O- | 522 |
| 2481 | Sense | mUs][fAs][fUs][fC][fA][mC][fU][mA][mA][fA][mU][mA] | |
| | | [mA][fG][mU][mC][mA][mA][mC][mUs][mGs][mG] | |
| RTN4- | Anti- | [MePhosphonate-4O- | 523 |
| 2481 | Sense | mUs][fAs][fUs][fC][fA][mC][fU][mA][mA][fA][mU][mA] | |
| | | [mA][fG][mU][mC][mA][mA][mC][mUs][mGs][mG] | |
| RTN4- | Anti- | [MePhosphonate-4O- | 524 |
| 2481 | Sense | mUs][fAs][fUs][fC][fA][mC][fU][mA][mA][fA][mU][mA] | |
| | | [mA][fG][mU][mC][mA][mA][mC][mUs][mGs][mG] | |
| RTN4- | Anti- | [MePhosphonate-4O- | 525 |
| 2481 | Sense | mUs][fAs][fUs][fC][fA][mC][fU][mA][mA][fA][mU][mA] | |
| | | [mA][fG][mU][mC][mA][mA][mC][mUs][mGs][mG] | |
| Stem | N/A | GCAGCCGAAAGGCUGC | 526 |
| loop | | | |
| TUBB3- | Sense | UGAGAAUUGUGACUGAGCAGCCGAAAGGCUGC | 527 |
| 445 | | | |
| TUBB3- | Sense | AGAAUUGUGACUGAGCAGCCGAAAGGCUGC | 528 |
| 445 | | | |
| TUBB3- | Sense | AAUUGUGACUGAGCAGCCGAAAGGCUGC | 529 |
| 445 | | | |
| TUBB3- | Sense | [mUs][mG][mA][fG][fA][fA][fU][mU][mG][mU][mG][mA] | 530 |
| 445 | | [mC][mU][mG][mA][mG][mC][mA][mG][mC][mC][mG] | |
| | | [ademA-C16][mA][mA][mG][mG][mC][mU][mG][mC] | |
| TUBB3- | Sense | [+As][fG][fA][fA][fU][mU][mG][mU][mG][mA][mC][mU] | 531 |
| 445 | | [mG][mA][mG][mC][mA][mG][mC][mC][mG][ademA- | |
| | | C16][mA][mA][mG][mG][mC][mU][mG][mC] | |
| TUBB3- | Sense | [+As][fA][fU][mU][mG][mU][mG][mA][mC][mU][mG][mA] | 532 |
| 445 | | [mG][mC][mA][mG][mC][mC][mG][ademA- | |
| | | C16][mA][mA][mG][mG][mC][mU][mG][mC] | |
| TUBB3- | Anti- | [MePhosphonate-4O- | 533 |
| 445 | sense | mUs][fCs][fAs][fG][fU][mC][fA][mC][mA][fA][mU][mU] | |
| | | [mCs][fUs][mC][mA][mC][mA][mC][mUs][mGs][mG] | |
| TUBB3- | Anti- | [MePhosphonate-4O- | 534 |
| 445 | sense | mUs][fCs][fAs][fG][fU][mC][fA][mC][mA][fA][mU][mU] | |
| | | [mC][fU][mC][mAs][mCs][mAs][mCs][mUs][mGs][mG] | |
| TUBB3- | Anti- | [MePhosphonate-4O- | 535 |
| 445 | sense | mUs][fCs][fAs][fG][fU][mC][fA][mC][mA][fA][mU][mU] | |
| | | [mCs][fUs][mCs][mAs][mCs][mAs][mCs][mUs][mGs][mG] | |
| TUBB3- | Anti- | [MePhosphonate-4O- | 536 |
| 445 | sense | mUs][fCs][fAs][fG][fU][mC][fA][mC][mA][fA][mU][mUs] | |
| | | [mCs][fUs][mCs][mAs][mCs][mAs][mCs][mUs][mGs][mG] | |
| TUBB3- | Sense | AGAAUUGUGACUGA | 537 |
| 455 | | | |
| TUBB3- | Sense | AGAAUUGUGACTGA | 538 |
| 455 | | | |
| TUBB3- | Sense | [ademAs-C16][+G][mU][mG][mU][mG][mA][fG][fA] | 539 |
| 455 | | [[A][fU][mU][mG][mU][mG][mA][mC][mUs][mGs][mA] | |
| TUBB3- | Sense | [ademAs-C16][+G][mU][mG][mU][mG][mA][fG][fA] | 540 |
| 455 | | [fA][fU][mU][mG][mU][+G][mA][mC][mUs][mGs][mA] | |
| TUBB3- | Sense | [ademAs-C16][+G][mU][mG][mU][mG][mA][fG][fA] | 541 |
| 455 | | [fA][fU][mU][mG][mU][+G][+A][mC][mUs][mGs][mA] | |
| TUBB3- | Sense | [ademAs-C16][fG][fA][fA][fU][mU][mG][mU][mG] | 542 |
| 455 | | [mA][mC][mUs][mGs][mA] | |
| TUBB3- | Sense | [ademAs-C16][+G][fA][fA][fU][mU][mG][mU][mG] | 543 |
| 455 | | [mA][mC][mUs][mGs][mA] | |
| TUBB3- | Sense | [ademAs-C16][+G][fA][fA][fU][mU][mG][mU][+G] | 544 |
| 455 | | [mA][mC][mUs][mGs][mA] | |
| TUBB3- | Sense | [ademAs-C16][+G][fA][fA][fU][mU][mG][mU][+G] | 545 |
| 455 | | [+A][mC][mUs][mGs][mA] | |
| TUBB3- | Sense | [ademAs-C16][+G][A][fA][fU][mU][mG][mU][+G] | 546 |
| 455 | | [+A][mC][+Ts][+Gs][mA] | |
| TUBB3- | Sense | [mAs][mG][mU][mG][mU][mG][mA][fG][fA][fA][fU][mU] | 547 |
| 455 | | [mG][mU][mG][mA][mC][mUs][mGs][mA] | |
| TUBB3- | Sense | [ademAs-C16][+G][mU][mG][mU][mG][mA][fG][fA] | 548 |
| 455 | | [fA][fU][mU][mG][mU][+G][+A][mC][+Ts][mGs][mA] | |
| TUBB3- | Sense | UGAGAAUUGUGACUGA | 549 |
| 455 | | | |
| TUBB3- | Sense | UGAGAAUUGUGACTGA | 550 |
| 455 | | | |
| TUBB3- | Sense | [ademUs-C16][mG][mA][fG][fA][fA][fU][mU][mG] | 551 |
| 455 | | [mU][mG][mA][mC][mUs][mGs][mA] | |
| TUBB3- | Sense | [ademUs-C16][+G][mA][fG][fA][fA][fU][mU][mG] | 552 |
| 455 | | [mU][mG][mA][mC][mUs][mGs][mA] | |
| TUBB3- | Sense | [ademUs-C16][+G][mA][fG][fA][fA][fU][mU][mG] | 553 |
| 455 | | [mU][+G][mA][mC][mUs][mGs][mA] | |
| TUBB3- | Sense | [ademUs-C16][+G][mA][fG][fA][fA][fU][mU][mG] | 554 |
| 455 | | [mU][+G][+A][mC][mUs][mGs][mA] | |
| TUBB3- | Sense | [ademUs-C16][+G][mA][fG][fA][fA][fU][mU][mG] | 555 |
| 455 | | [mU][+G][+A][mC][+Ts][mGs][mA] | |
| TUBB3- | Sense | [ademUs-C16][+G][mA][fG][fA][fA][fU][mU] | 556 |
| 455 | | [mG][mU][+G][+A][mC][+Ts][+Gs][mA] | |
| TUBB3- | Sense | AAUUGUGACUGA | 557 |
| 455 | | | |
| TUBB3- | Sense | AAUUGUGACTGA | 558 |
| 455 | | | |
| TUBB3- | Sense | [ademAs-C16][mA][fU][mU][mG][mU][mG][mA] | 559 |
| 455 | | [mC][mUs][mGs][mA] | |
| TUBB3- | Sense | [ademAs-C16][+A][fU][mU][mG][mU][mG][mA] | 560 |
| 455 | | [mC][mUs][mGs][mA] | |
| TUBB3- | Sense | [ademAs-C16][+A][fU][mU][mG][mU][+G][mA] | 561 |
| 455 | | [mC][mUs][mGs][mA] | |
| TUBB3- | Sense | [ademAs-C16][+A][fU][mU][mG][mU][+G][+A] | 562 |
| 455 | | [mC][mUs][mGs][mA] | |
| TUBB3- | Sense | [ademAs-C16][+A][fU][mU][mG][mU][+G][+A] | 563 |
| 455 | | [mC][+Ts][mGs][mA] | |
| TUBB3- | Sense | [ademAs-C16][+A][fU][mU][mG][mU][+G][+A] | 564 |
| 455 | | [mC][+Ts][+Gs][mA] | |
| UGT8- | Sense | CAAUUAUGUUUGAAAGCCAA | 565 |
| 277 | | | |
| UGT8- | Sense | UGUUUGAAAGCCAA | 566 |
| 277 | | | |
| UGT8- | Sense | [ademCs-C16][mA][mA][mU][mU][mA][mU][fG] | 567 |
| 277 | | [fU][fU][fU][mG][mA][mA][mA][mG][mC][mCs][mAs][mA] | |
| UGT8- | Sense | [ademCs-C16][+A][mA][mU][mU][mA][mU][fG] | 568 |
| 277 | | [fU][fU][fU][mG][mA][mA][mA][mG][mC][mCs][mAs][mA] | |
| UGT8- | Sense | [ademCs-C16][+A][mA][mU][mU][mA][mU][fG] | 569 |
| 277 | | [fU][fU][fU][mG][mA][mA][+A][mG][mC][mCs][mAs][mA] | |
| UGT8- | Sense | [ademCs-C16][+A][mA][mU][mU][mA][mU][fG] | 570 |
| 277 | | [fU][fU][fU][mG][mA][mA][+A][+G][mC][mCs][mAs][mA] | |
| UGT8- | Sense | [ademUs-C16][fG][fU][fU][fU][mG][mA][mA] | 571 |
| 277 | | [mA][mG][mC][mCs][mAs][mA] | |
| UGT8- | Sense | [ademUs-C16][+G][fU][fU][fU][mG][mA][mA] | 572 |
| 277 | | [mA][mG][mC][mCs][mAs][mA] | |
| UGT8- | Sense | [ademUs-C16][+G][fU][fU][fU][mG][mA][mA] | 573 |
| 277 | | [+A][mG][mC][mCs][mAs][mA] | |
| UGT8- | Sense | [ademUs-C16][+G][fU][fU][fU][mG][mA][mA] | 574 |
| 277 | | [+A][+G][mC][mCs][mAs][mA] | |
| UGT8- | Sense | [ademUs-C16][+G][fU][fU][fU][mG][mA][mA] | 575 |
| 277 | | [+A][+G][mC][+Cs][+As][mA] | |
| UGT8- | Sense | [mCs][mA][mA][mU][mU][mA][mU][fG][fU][fU][fU][mG] | 576 |
| 277 | | [mA][mA][mA][mG][mC][mCs][mAs][mA] | |
| UGT8- | Anti- | UUGGCUUUCAAACAUAAUUGGG | 577 |
| 277 | sense | | |
| UGT8- | Anti- | [MePhosphonate-4O- | 578 |
| 277 | sense | mUs][fUs][fGs][fG][fC][mU][fU][mU][mC][fA][mA][mA] | |
| | | [mC][fA][mU][mA][mA][mU][mU][mGs][mGs][mG] | |
| UGT8- | Anti- | [MePhosphonate-4O- | 579 |
| 277 | sense | mUs][fUs][fGs][fG][fC][mU][fU][mU][mC][fA][mA][mA] | |
| | | [mCs][fAs][mU][mA][mA][mU][mU][mGs][mGs][mG] | |
| UGT8- | Sense | CAAUUAUGUUUGAAAGCCAAGCAGCCGAAAGGCUG | 580 |
| 277 | | C | |
| UGT8- | Sense | [mCs][mA][mA][mU][mU][mA][mU][fG][fU][fU][fU][mG] | 581 |
| 277 | | [mA][mA][mA][mG][mC][mC][mA][mA][mG][mC][mA][mG] | |
| | | [mC][mC][mG][ademA-C16][mA][mA][mG][mG][mC] | |
| | | [mU][mG][mC] | |
| GFAP- | Sense | AGGAUCUACUCAACGUUAAAGCAGCCGAAAGGCUG | 582 |
| 1147 | | C | |
| GFAP- | Sense | AGGAUCUACUCAACGUUAAA | 583 |
| 1147 | | | |
| GFAP- | Sense | UACUCAACGUUAAA | 584 |
| 1147 | | | |
| GFAP- | Sense | [mAs][mG][mG][mA][mU][mC][mU][fA][fC][fU][fC][mA] | 585 |
| 1147 | | [mA][mC][mG][mU][mU][mA][mA][mA][mG][mC][mA][mG] | |
| | | [mC][mC][mG][ademA-C16][mA][mA][mG] | |
| | | [mG][mC][mU][mG][mC] | |
| GFAP- | Sense | [ademAs-C16][mG][mG][mA][mU][mC][mU][fA] | 586 |
| 1147 | | [fC][fU][fC][mA][mA][mC][mG][mU][mU][mAs][mAs][mA] | |
| GFAP- | Sense | [ademAs-C16][+G][mG][mA][mU][mC][mU][A][fC] | 587 |
| 1147 | | [fU][fC][mA][mA][mC][mG][mU][mU][mAs][mAs][mA] | |
| GFAP- | Sense | [ademAs-C16][+G][mG][mA][mU][mC][mU][fA][fC] | 588 |
| 1147 | | [fU][fC][mA][mA][mC][+G][mU][mU][mAs][mAs][mA] | |
| GFAP- | Sense | [ademAs-C16][+G][mG][mA][mU][mC][mU][fA][fC] | 589 |
| 1147 | | [fU][fC][mA][mA][mC][+G][+]][mU][mAs][mAs][mA] | |
| GFAP- | Sense | [ademUs-C16][fA][fC][fU][fC][mA][mA][mC][mG] | 590 |
| 1147 | | [mU][mU][mAs][mAs][mA] | |
| GFAP- | Sense | [ademUs-C16][+A][fC][fU][fC][mA][mA][mC][mG] | 591 |
| 1147 | | [mU][mU][mAs][mAs][mA] | |
| GFAP- | Sense | [ademUs-C16][+A][fC][fU][fC][mA][mA][mC][+G] | 592 |
| 1147 | | [mU][mU][mAs][mAs][mA] | |
| GFAP- | Sense | [ademUs-C16][+A][fC][fU][fC][mA][mA][mC][+G] | 593 |
| 1147 | | [+T][mU][mAs][mAs][mA] | |
| GFAP- | Sense | [ademUs-C16][+A][fC][fU][fC][mA][mA][mC][+G] | 594 |
| 1147 | | [+T][mU][+As][+As][mA] | |
| GFAP- | Sense | [mAs][mG][mG][mA][mU][mC][mU][fA][fC][fU][fC][mA] | 595 |
| 1147 | | [mA][mC][mG][mU][mU][mAs][mAs][mA] | |
| GFAP- | Anti- | UUUAACGUUGAGUAGAUCCUGG | 596 |
| 1147 | sense | | |
| GFAP- | Anti- | [MePhosphonate-4O- | 597 |
| 1147 | sense | mUs][fUs][fUs][fA][fA][mC][fG][mU][mU][fG][mA][mG] | |
| | | [mU][fA][mG][mA][mU][mC][mC][mUs][mGs][mG] | |
| GFAP- | Anti- | [MePhosphonate-4O- | 598 |
| 1147 | sense | mUs][fUs][fUs][fA][fA][mC][fG][mU][mU][fG][mA][mG] | |
| | | [mUs][fAs][mG][mA][mU][mC][mC][mUs][mGs][mG] | |
| TUBB3- | Sense | [mAs][ademG- | 599 |
| 445 | | C16][mU][mG][mU][mG][mA][fG][fA][fA][fU][mU][mG] | |
| | | [mU][mG][mA][mC][mUs][mGs][mA] | |
| TUBB3- | Sense | [mAs][mG][ademU- | 600 |
| 445 | | C16][mG][mU][mG][mA][fG][fA][fA][fU][mU][mG][mU] | |
| | | [mG][mA][mC][mUs][mGs][mA] | |
| TUBB3- | Sense | [mAs][mG][mU][ademG- | 601 |
| 445 | | C16][mU][mG][mA][fG][fA][fA][fU][mU][mG][mU][mG] | |
| | | [mA][mC][mUs][mGs][mA] | |
| TUBB3- | Sense | [mAs][mG][mU][mG][ademU- | 602 |
| 445 | | C16][mG][mA][fG][fA][fA][fU][mU][mG][mU][mG][mA] | |
| | | [mC][mUs][mGs][mA] | |
| TUBB3- | Sense | [mAs][mG][mU][mG][mU][ademG- | 603 |
| 445 | | C16][mA][fG][fA][fA][fU][mU][mG][mU][mG][mA][mC] | |
| | | [mUs][mGs][mA] | |
| TUBB3- | Sense | [mAs][mG][mU][mG][mU][mG][ademA- | 604 |
| 445 | | C16][fG][fA][fA][fU][mU][mG][mU][mG][mA][mC][mUs] | |
| | | [mGs][mA] | |
| TUBB3- | Sense | [mAs][mG][mU][mG][mU][mG][mA][ademG- | 605 |
| 445 | | C16][fA][fA][fU][mU][mG][mU][mG][mA][mC][mUs][mGs] | |
| | | [mA] | |
| TUBB3- | Sense | [mAs][mG][mU][mG][mU][mG][mA][mG][ademA-C16] | 606 |
| 445 | | [fA][fU][mU][mG][mU][mG][mA][mC][mUs][mGs][mA] | |
| TUBB3- | Sense | [mUs][ademG-C16][mA][fG][fA][fA][fU][mU][mG] | 607 |
| 445 | | [mU][mG][mA][mC][mUs][mGs][mA] | |
| TUBB3- | Sense | [mUs][mG][ademA-C16][fG][fA][fA][fU][mU][mG][mU] | 608 |
| 445 | | [mG][mA][mC][mUs][mGs][mA] | |
| TUBB3- | Sense | [mUs][mG][mA][ademG-C16][fA][fA][fU][mU][mG][mU] | 609 |
| 445 | | [mG][mA][mC][mUs][mGs][mA] | |
| TUBB3- | Sense | [mUs][mG][mA][fG][ademA-C16][fA][fU][mU][mG][mU] | 610 |
| 445 | | [mG][mA][mC][mUs][mGs][mA] | |
| TUBB3- | Sense | [mAs][ademG-C16][fA][fA][fU][mU][mG][mU] | 611 |
| 445 | | [mG][mA][mC][mUs][mGs][mA] | |
| TUBB3- | Sense | [mAs][mG][ademA-C16][fA][fU][mU][mG][mU][mG] | 612 |
| 445 | | [mA][mC][mUs][mGs][mA] | |
| TUBB3- | Sense | [ademAs-C16][fA][fU][mU][mG][mU][mG] | 613 |
| 445 | | [mA][mC][mUs][mGs][mA] | |
| GFAP- | Sense | AGGAUCUACUCAACGTUAAA | 614 |
| 1147 | | | |
| GFAP- | Sense | UCUACUCAACGTUAAA | 615 |
| 1147 | | | |
| GFAP- | Sense | ATCUACUCAACGTUAA | 616 |
| 1147 | | | |
| GFAP- | Sense | GAUCUACUCAACGTUA | 617 |
| 1147 | | | |
| GFAP- | Sense | GGAUCUACUCAACGTU | 618 |
| 1147 | | | |
| GFAP- | Sense | AGGAUCUACUCAACGT | 619 |
| 1147 | | | |
| GFAP- | Sense | UACUCAACGTUAAA | 620 |
| 1147 | | | |
| GFAP- | Sense | CTACUCAACGTUAA | 621 |
| 1147 | | | |
| GFAP- | Sense | UCUACUCAACGTUA | 622 |
| 1147 | | | |
| GFAP- | Sense | ATCUACUCAACGTU | 623 |
| 1147 | | | |
| GFAP- | Sense | GAUCUACUCAACGT | 624 |
| 1147 | | | |
| GFAP- | Sense | CTCAACGTUAAA | 625 |
| 1147 | | | |
| GFAP- | Sense | ACUCAACGTUAA | 626 |
| 1147 | | | |
| GFAP- | Sense | UACUCAACGTUA | 627 |
| 1147 | | | |
| GFAP- | Sense | CTACUCAACGTU | 628 |
| 1147 | | | |
| GFAP- | Sense | UCUACUCAACGT | 629 |
| 1147 | | | |
| TUBB3- | Sense | GTGAGAAUUGUGACUG | 630 |
| 0445 | | | |
| TUBB3- | Sense | UGUGAGAAUUGUGACU | 631 |
| 0445 | | | |
| TUBB3- | Sense | GTGUGAGAAUUGUGAC | 632 |
| 0445 | | | |
| TUBB3- | Sense | GAGAAUUGUGACUG | 633 |
| 0445 | | | |
| TUBB3- | Sense | UGAGAAUUGUGACU | 634 |
| 0445 | | | |
| TUBB3- | Sense | GTGAGAAUUGUGAC | 635 |
| 0445 | | | |
| TUBB3- | Sense | UGUGAGAAUUGUGA | 636 |
| 0445 | | | |
| TUBB3- | Sense | GAAUUGUGACUG | 637 |
| 0445 | | | |
| TUBB3- | Sense | AGAAUUGUGACU | 638 |
| 0445 | | | |
| TUBB3- | Sense | GAGAAUUGUGAC | 639 |
| 0445 | | | |
| TUBB3- | Sense | UGAGAAUUGUGA | 640 |
| 0445 | | | |
| GFAP- | Sense | UCUACUCAACGUUAAA | 641 |
| 1147 | | | |
| GFAP- | Sense | UCUACUCAACGUUA | 642 |
| 1147 | | | |
| GFAP- | Sense | UACUCAACGUUA | 643 |
| 1147 | | | |
| TUBB3- | Sense | AGUGUGAGAAUUGTGACUGA | 644 |
| 0445 | | | |
| TUBB3- | Sense | UTGUGACUGA | 665 |
| 0445 | | | |
| TUBB3- | Sense | ATUGUGACUG | 666 |
| 0445 | | | |
| TUBB3- | Sense | AAUUGUGACU | 667 |
| 0445 | | | |
| TUBB3- | Sense | GAAUUGUGAC | 668 |
| 0445 | | | |
| TUBB3- | Sense | AGAAUUGUGA | 669 |
| 0445 | | | |
| TUBB3- | Sense | GAGAAUUGTG | 670 |
| 0445 | | | |
| TUBB3- | Sense | UGAGAAUUGT | 671 |
| 0445 | | | |
| GFAP- | Sense | [ademUs-C16][+C][mU][fA][fC][fU][fC][mA] | 672 |
| 1147 | | [mA][mC][+G][+T][mU][mAs][mAs][mA] | |
| GFAP- | Sense | [ademAs-C16][+T][mC][mU][fA][fC][fU][fC] | 673 |
| 1147 | | [mA][mA][mC][+G][+T][mUs][mAs][mA] | |
| GFAP- | Sense | [ademGs-C16][+A][mU][mC][mU][fA][fC][fU] | 674 |
| 1147 | | [fC][mA][mA][mC][+G][+Ts][mUs][mA] | |
| GFAP- | Sense | [ademGs-C16][+G][mA][mU][mC][mU][fA][fC] | 675 |
| 1147 | | [fU][fC][mA][mA][mC][+Gs][+Ts][mU] | |
| GFAP- | Sense | [ademAs-C16][+G][mG][mA][mU][mC][mU][fA] | 676 |
| 1147 | | [fC][fU][fC][mA][mA][mCs][+Gs][+T] | |
| GFAP- | Sense | [ademCs-C16][+T][fA][fC][fU][fC][mA][mA][mC] | 677 |
| 1147 | | [+G][+T][mUs][mAs][mA] | |
| GFAP- | Sense | [ademUs-C16][+C][mU][fA][fC][fU][fC][mA] | 678 |
| 1147 | | [mA][mC][+G][+Ts][mUs][mA] | |
| GFAP- | Sense | [ademAs-C16][+]][mC][mU][fA][fC][fU][fC][mA] | 679 |
| 1147 | | [mA][mC][+Gs][+Ts][mU] | |
| GFAP- | Sense | [ademGs-C16][+A][mU][mC][mU][fA][fC][fU][fC] | 680 |
| 1147 | | [mA][mA][mCs][+Gs][+T] | |
| GFAP- | Sense | [ademCs-C16][+T][fC][mA][mA][mC][+G][+T][mU] | 681 |
| 1147 | | [mAs][mAs][mA] | |
| GFAP- | Sense | [ademAs-C16][+C][fU][fC][mA][mA][mC][+G][+T] | 682 |
| 1147 | | [mUs][mAs][mA] | |
| GFAP- | Sense | [ademUs-C16][+A][fC][fU][fC][mA][mA][mC] | 683 |
| 1147 | | [+G][+Ts][mUs][mA] | |
| GFAP- | Sense | [ademCs-C16][+T][fA][fC][fU][fC][mA][mA][mC] | 684 |
| 1147 | | [+Gs][+Ts][mU] | |
| GFAP- | Sense | [ademUs-C16][+C][mU][fA][fC][fU][fC][mA][mA] | 685 |
| 1147 | | [mCs][+Gs][+T] | |
| TUBB3- | Sense | [ademGs-C16][+T][mG][mA][fG][fA][fA][fU][mU][mG] | 686 |
| 0445 | | [mU][+G][+A][mCs][mUs][mG] | |
| TUBB3- | Sense | [ademUs-C16][+G][mU][mG][mA][fG][fA][fA][fU][mU] | 687 |
| 0445 | | [mG][mU][+G][+As][mCs][mU] | |
| TUBB3- | Sense | [ademGs-C16][+T][mG][mU][mG][mA][fG][fA][fA][fU] | 688 |
| 0445 | | [mU][mG][mU][+Gs][+As][mC] | |
| TUBB3- | Sense | [ademGs-C16][+A][fG][fA][fA][fU][mU][mG][mU] | 689 |
| 0445 | | [+G][+A][mCs][mUs][mG] | |
| TUBB3- | Sense | [ademUs-C16][+G][mA][fG][fA][fA][fU][mU][mG] | 690 |
| 0445 | | [mU][+G][+As][mCs][mU] | |
| TUBB3- | Sense | [ademGs-C16][+T][mG][mA][fG][fA][fA][fU][mU] | 691 |
| 0445 | | [mG][mU][+Gs][+As][mC] | |
| TUBB3- | Sense | [ademUs-C16][+G][mU][mG][mA][fG][fA][fA] | 692 |
| 0445 | | [fU][mU][mG][mUs][+Gs][+A] | |
| TUBB3- | Sense | [ademGs-C16][+A][fA][fU][mU][mG][mU][+G][+A] | 693 |
| 0445 | | [mCs][mUs][mG] | |
| TUBB3- | Sense | [ademAs-C16][+G][fA][fA][fU][mU][mG][mU][+G] | 694 |
| 0445 | | [+As][mCs][mU] | |
| TUBB3- | Sense | [ademGs-C16][+A][fG][fA][fA][fU][mU][mG][mU] | 695 |
| 0445 | | [+Gs][+As][mC] | |
| TUBB3- | Sense | [ademUs-C16][+G][mA][fG][fA][fA][fU][mU] | 696 |
| 0445 | | [mG][mUs][+Gs][+A] | |
| GFAP- | Sense | [ademAs-C16][mG][mG][mA][mU][+C][mU][fA] | 697 |
| 1147 | | [fC][fU][fC][mA][mA][mC][+G][+T][mU][mAs][mAs][mA] | |
| GFAP- | Sense | [ademUs-C16][mC][mU][fA][fC][fU][fC][mA] | 698 |
| 1147 | | [mA][mC][mG][mU][mU][mAs][mAs][mA] | |
| GFAP- | Sense | [mUs][mC][ademU-C16][fA][fC][fU][fC][mA][mA][mC] | 699 |
| 1147 | | [mG][mU][mU][mAs][mAs][mA] | |
| GFAP- | Sense | [mUs][mC][mU][fA][ademC-C16][fU][fC][mA][mA][mC] | 700 |
| 1147 | | [mG][mU][mU][mAs][mAs][mA] | |
| GFAP- | Sense | [ademUs-C16][mC][mU][fA][fC][fU][fC] | 701 |
| 1147 | | [mA][mA][mC][mG][mUs][mUs][mA] | |
| GFAP- | Sense | [mUs][mC][ademU-C16][fA][fC][fU][fC][mA][mA] | 702 |
| 1147 | | [mC][mG][mUs][mUs][mA] | |
| GFAP- | Sense | [mUs][mC][mU][fA][ademC-C16][fU][fC][mA] | 703 |
| 1147 | | [mA][mC][mG][mUs][mUs][mA] | |
| GFAP- | Sense | [mUs][+C][ademU-C16][fA][fC][fU][fC][mA][mA] | 704 |
| 1147 | | [mC][+G][+T][mU][mAs][mAs][mA] | |
| GFAP- | Sense | [mUs][+C][mU][fA][ademC-C16][fU][fC][mA][mA][mC] | 705 |
| 1147 | | [+G][+T][mU][mAs][mAs][mA] | |
| GFAP- | Sense | [mUs][+C][ademU-C16][fA][fC][fU][fC] | 706 |
| 1147 | | [mA][mA][mC][+G][+Ts][mUs][mA] | |
| GFAP- | Sense | [mUs][+C][mU][fA][ademC-C16][fU][fC][mA][mA] | 707 |
| 1147 | | [mC][+G][+Ts][mUs][mA] | |
| GFAP- | Sense | [ademAs-C16][mG][mG][mA][mU][mC][mU][+A] | 708 |
| 1147 | | [fC][fU][fC][mA][mA][mC][+G][+T][mU][mAs][mAs][mA] | |
| GFAP- | Sense | [ademUs-C16][fA][fC][fU][fC][mA][mA][mC][mG] | 709 |
| 1147 | | [mU][mU][mAs][mAs][mA] | |
| GFAP- | Sense | [mU][fA][ademC-C16][fU][fC][mA][mA][mC][mG][mU] | 710 |
| 1147 | | [mU][mAs][mAs][mA] | |
| GFAP- | Sense | [mUs][+A][ademC-C16][fU][fC][mA][mA][mC][+G][+T] | 711 |
| 1147 | | [mU][mAs][mAs][mA] | |
| GFAP- | Sense | [ademUs-C16][fA][fC][fU][fC][mA][mA][mC] | 712 |
| 1147 | | [mG][mUs][mUs][mA] | |
| GFAP- | Sense | [mU][fA][ademC-C16][fU][fC][mA][mA][mC][mG][mUs] | 713 |
| 1147 | | [mUs][mA] | |
| GFAP- | Sense | [mUs][+A][ademC-C16][fU][fC][mA][mA][mC][+G][+Ts] | 714 |
| 1147 | | [mUs][mA] | |
| TUBB3- | Sense | [ademAs-C16][mG][mU][mG][mU][+G][mA][fG] | 715 |
| 0445 | | [fA][fA][fU][mU][mG][mU][+G][+A][mC][mUs][mGs][mA] | |
| TUBB3- | Sense | [ademUs-C16][mG][mA][fG][fA][fA][fU][mU][mG] | 716 |
| 0445 | | [mU][mG][mAs][mCs][mU] | |
| TUBB3- | Sense | [mUs][mG][ademA-C16][fG][fA][fA][fU][mU][mG] | 717 |
| 0445 | | [mU][mG][mAs][mCs][mU] | |
| TUBB3- | Sense | [mUs][mG][mA][fG][ademA- | 718 |
| 0445 | | C16][fA][fU][mU][mG][mU][mG][mAs][mCs][mU] | |
| TUBB3- | Sense | [mUs][+G][ademA-C16][fG][fA][fA][fU][mU][mG] | 719 |
| 0445 | | [mU][+G][+A][mC][mUs][mGs][mA] | |
| TUBB3- | Sense | [mUs][+G][mA][fG][ademA-C16][fA][fU][mU][mG][mU] | 720 |
| 0445 | | [+G][+A][mC][mUs][mGs][mA] | |
| TUBB3- | Sense | [mUs][+G][ademA-C16][fG][fA][fA][fU][mU] | 721 |
| 0445 | | [mG][mU][+G][+As][mCs][mU] | |
| TUBB3- | Sense | [mUs][+G][mA][fG][ademA-C16][fA][fU][mU][mG] | 722 |
| 0445 | | [mU][+G][+As][mCs][mU] | |
| TUBB3- | Sense | [ademAs-C16][mG][mU][mG][mU][mG][mA][+G] | 723 |
| 0445 | | [fA][fA][fU][mU][mG][mU][+G][+A][mC][mUs][mGs][mA] | |
| TUBB3- | Sense | [mAs][+G][ademA-C16][fA][fU][mU][mG][mU][+G] | 724 |
| 0445 | | [+A][mC][mUs][mGs][mA] | |
| TUBB3- | Sense | [ademAs-C16][fG][fA][fA][fU][mU][mG][mU] | 725 |
| 0445 | | [mG][mAs][mCs][mU] | |
| TUBB3- | Sense | [mA][fG][ademA-C16][fA][fU][mU][mG][mU][mG] | 726 |
| 0445 | | [mAs][mCs][mU] | |
| TUBB3- | Sense | [ademAs-C16][+G][fA][fA][fU][mU][mG][mU] | 727 |
| 0445 | | [+G][+As][mCs][mU] | |
| TUBB3- | Sense | [mAs][+G][ademA-C16][fA][fU][mU][mG][mU] | 728 |
| 0445 | | [+G][+As][mCs][mU] | |
| TUBB3- | Sense | [ademAs-C16][+G][mU][mG][mU][mG][mA][fG] | 729 |
| 0445 | | [fA][fA][fU][mU][mG][+T][+G][mA][mC][mUs][mGs][mA] | |
| TUBB3- | Sense | [ademAs-C16][+G][mU][mG][mU][mG][mA][fG] | 730 |
| 0445 | | [fA][fA][fU][mU][+G][+T][mG][mA][mC][mUs][mGs][mA] | |
| TUBB3- | Sense | [ademUs-C16][+T][mG][mU][+G][+A][mC] | 731 |
| 0445 | | [mUs][mGs][mA] | |
| TUBB3- | Sense | [ademAs-C16][+T][mU][mG][mU][+G][+A] | 732 |
| 0445 | | [mCs][mUs][mG] | |
| TUBB3- | Sense | [ademAs-C16][+A][fU][mU][mG][mU][+G][+As][mCs][mU] | 733 |
| 0445 | | | |
| TUBB3- | Sense | [ademGs-C16][+A][fA][fU][mU][mG][mU][+Gs][+As][mC] | 734 |
| 0445 | | | |
| TUBB3- | Sense | [ademAs-C16][+G][[A][fA][fU][mU][mG][mUs][+Gs][+A] | 735 |
| 0445 | | | |
| TUBB3- | Sense | [ademGs-C16][+A][fG][fA][fA][fU][mU][mGs][+Ts][+G] | 736 |
| 0445 | | | |
| TUBB3- | Sense | [ademUs-C16][+G][mA][fG][fA][fA][fU][mUs][+Gs][+T] | 737 |
| 0445 | | | |
| UGT8- | Sense | CAAUUAUGUUUGAAAGC | 738 |
| 277 | | | |
| UGT8- | Sense | UGUUUGAAAGC | 739 |
| 277 | | | |
| UGT8- | Sense | [ademCs-C16][mA][mA][mU][mU][mA][mU] | 740 |
| 277 | | [fG][fU][fU][fU][mG][mA][mA][mAs][mGs][mC] | |
| UGT8- | Sense | [ademUs-C16][+G][fU][fU][fU][mG][mA][mA] | 741 |
| 277 | | [mAs][mGs][mC] | |
| ALDH2 | Sense | GGUGGAUGAAACUCAGUUUA | 742 |
| ALDH2 | Sense | GGUGGAUGAAACUCAGUUU | 743 |
| ALDH2 | Sense | GGUGGAUGAAACUCAGUU | 744 |
| ALDH2 | Sense | GGUGGAUGAAACUCAGU | 745 |
| ALDH2 | Sense | GGUGGAUGAAACUCAG | 746 |
| ALDH2 | Sense | [ademGs- | 747 |
| | | C22][mG][mU][mG][mG][mA][mU][fG][fA][fA][fA][mC][mU] | |
| | | [mC][mA][mG][mU][mUs][mUs][mA] | |
| ALDH2 | Sense | [ademGs- | 748 |
| | | C22][mG][mU][mG][mG][mA][mU][fG][fA][fA][fA][mC][mU] | |
| | | [mC][mA][mG][mUs][mUs][mU] | |
| ALDH2 | Sense | [ademGs- | 749 |
| | | C22][mG][mU][mG][mG][mA][mU][fG][fA][fA][fA][mC][mU] | |
| | | [mC][mA][mGs][mUs][mU] | |
| ALDH2 | Sense | [ademGs- | 750 |
| | | C22][mG][mU][mG][mG][mA][mU][fG][fA][fA][fA][mC][mU] | |
| | | [mC][mAs][mGs][mU] | |
| ALDH2 | Sense | [ademGs- | 751 |
| | | C22][mG][mU][mG][mG][mA][mU][fG][fA][fA][fA][mC][mU] | |
| | | [mCs][mAs][mG] | |
| ALDH2 | Anti- | [MePhosphonate-4O- | 752 |
| | sense | mUs][fAs][fAs][fA][fC][mU][fG][mA][mG][fU][mU][mU] | |
| | | [mC][fA][mU][mC][mC][mA][mC][mCs][mGs][mG] | |
| ALDH2 | Anti- | [MePhosphonate-4O- | 753 |
| | sense | mUs][fAs][fAs][fAs][fC][mU][fG][mA][mG][fU][mU][mU] | |
| | | [mC][fA][mU][mC][mC][mA][mC][mCs][mGs][mG] | |

SEQUENCE LISTING-II

| | | | | SEQ |
|---|---|---|---|---|
| | | | | ID |
| Name | Description | Ligand | Sequence | NO |
| GFAP- | 19 mer sense | N/A | AGGAUCUACUCAACGUUAA | 754 |
| 1147 | strand | | | |
| GFAP- | 19 mer | N/A | UUAACGUUGAGUAGAUCCU | 755 |
| 1147 | antisense | | | |
| | strand | | | |
| GFAP- | 36 mer sense | N/A | AGGAUCUACUCAACGUUAAAGCAGCCGAA | 756 |
| 1147 | strand | | AGGCUGC | |
| GFAP- | 36 mer | N/A | UUUAACGUUGAGUAGAUCCUGG | 757 |
| 1147 | antisense | | | |
| | strand | | | |
| GFAP- | Modified | GalNAc | [mAs][mG][mG][mA][mU][mC][mU][fA][fC][fU] | 758 |
| 1147 | 36 mer sense | | [fC][mA][mA][mC][mG][mU][mU][mA][mA][mA] | |
| | strand | | [mG][mC][mA][mG][mC][mC][mG][ademA- | |
| | | | GalNAc][ademA-GalNAc][ademA- | |
| | | | GalNAc][mG][mG][mC][mU][mG][mC] | |
| GFAP- | Modified | Tetraloop | [ademAs-C16][mG][mG][mA][mU][mC][mU] | 759 |
| 1147 | 36 mer sense | P1 C16 | [fA][fC][fU][fC][mA][mA][mC][mG][mU][mU] | |
| | strand | | [mA][mA][mA][mG][mC][mA][mG][mC][mC][mG] | |
| | | | [mA][mA][mA][mG][mG][mC][mU][mG][mC] | |
| GFAP- | Modified | Tetraloop | [mAs][mG][mG][ademA-C16][mU][mC][mU] | 760 |
| 1147 | 36 mer sense | P4 C16 | [fA][fC][fU][fC][mA][mA][mC][mG][mU][mU] | |
| | strand | | [mA][mA][mA][mG][mC][mA][mG][mC][mC][mG] | |
| | | | [mA][mA][mA][mG][mG][mC][mU][mG][mC] | |
| GFAP- | Modified | Tetraloop | [mAs][mG][mG][mA][mU][mC][mU][ademA- | 761 |
| 1147 | 36 mer sense | P8 C16 | C16][fC][fU][fC][mA][mA][mC][mG][mU][mU] | |
| | strand | | [mA][mA][mA][mG][mC][mA][mG][mC][mC][mG] | |
| | | | [mA][mA][mA][mG][mG][mC][mU][mG][mC] | |
| GFAP- | Modified | Tetraloop | [mAs][mG][mG][mA][mU][mC][mU][fA][fC][fU] | 762 |
| 1147 | 36 mer sense | P12 C16 | [fC][ademA-C16][mA][mC][mG][mU][mU] | |
| | strand | | [mA][mA][mA][mG][mC][mA][mG][mC][mC] | |
| | | | [mG][mA][mA][mA][mG][mG][mC][mU][mG][mC] | |
| GFAP- | Modified | Tetraloop | [mAs][mG][mG][mA][mU][mC][mU][fA][fC][fU] | 763 |
| 1147 | 36 mer sense | P13 C16 | [fC][mA][ademA-C16][mC][mG][mU][mU][mA] | |
| | strand | | [mA][mA][mG][mC][mA][mG][mC][mC][mG] | |
| | | | [mA][mA][mA][mG][mG][mC][mU][mG][mC] | |
| GFAP- | Modified | Tetraloop | [mAs][mG][mG][mA][mU][mC][mU][fA][fC][fU] | 764 |
| 1147 | 36 mer sense | P18 C16 | [fC][mA][mA][mC][mG][mU][mU][ademA-C16] | |
| | strand | | [mA][mA][mG][mC][mA][mG][mC][mC][mG] | |
| | | | [mA][mA][mA][mG][mG][mC][mU][mG][mC] | |
| GFAP- | Modified | Tetraloop | [mAs][mG][mG][mA][mU][mC][mU][fA][fC][fU] | 765 |
| 1147 | 36 mer sense | P19 C16 | [fC][mA][mA][mC][mG][mU][mU][mA][ademA- | |
| | strand | | C16][mA][mG][mC][mA][mG][mC][mC][mG] | |
| | | | [mA][mA][mA][mG][mG][mC][mU][mG][mC] | |
| GFAP- | Modified | Tetraloop | [mAs][mG][mG][mA][mU][mC][mU][fA][fC][fU] | 766 |
| 1147 | 36 mer sense | P20 C16 | [fC][mA][mA][mC][mG][mU][mU][mA][mA] | |
| | strand | | [ademA- | |
| | | | C16][mG][mC][mA][mG][mC][mC][mG][mA] | |
| | | | [mA][mA][mG][mG][mC][mU][mG][mC] | |
| GFAP- | Modified | Tetraloop | [mAs][mG][mG][mA][mU][mC][mU][A][fC][fU] | 767 |
| 1147 | 36 mer sense | P23 C16 | [fC][mA][mA][mC][mG][mU][mU][mA][mA][mA] | |
| | strand | | [mG][mC][ademA- | |
| | | | C16][mG][mC][mC][mG][mA] | |
| | | | [mA][mA][mG][mG][mC][mU][mG][mC] | |
| GFAP- | Modified | Tetraloop | [mAs][mG][mG][mA][mU][mC][mU][A][fC][fU] | 768 |
| 1147 | 36 mer sense | P28 C16 | [fC][mA][mA][mC][mG][mU][mU][mA][mA] | |
| | strand | | [mA][mG][mC][mA][mG][mC][mC][mG][ademA- | |
| | | | C16] | |
| | | | [mA][mA][mG][mG][mC][mU][mG][mC] | |
| GFAP- | Modified | Tetraloop | [mAs][mG][mG][mA][mU][mC][mU][fA][fC][fU] | 769 |
| 1147 | 36 mer sense | P29 C16 | [fC][mA][mA][mC][mG][mU][mU][mA][mA] | |
| | strand | | [mA][mG][mC][mA][mG][mC][mC][mG][mA][ademA- | |
| | | | C16][mA][mG][mG][mC][mU][mG][mC] | |
| GFAP- | Modified | Tetraloop | [mAs][mG][mG][mA][mU][mC][mU][fA][fC][fU] | 770 |
| 1147 | 36 mer sense | P30 C16 | [fC][mA][mA][mC][mG][mU][mU][mA][mA] | |
| | strand | | [mA][mG][mC][mA][mG][mC][mC][mG][mA][mA] | |
| | | | [ademA-C16][mG][mG][mC][mU][mG][mC] | |
| GFAP- | Modified | N/A | [MePhosphonate-4O-mUs][fUs][fUs][fA][fA][mC] | 771 |
| 1147 | 22 mer | | [fG][mU][mU][fG][mA][mG][mU][fA][mG][mA] | |
| | antisense | | [mU][mC][mC][mUs][mGs][mG] | |
| | strand | | | |
| GFAP- | 20 mer sense | N/A | AGGAUCUACUCAACGUUAAA | 772 |
| 1147 | strand | | | |
| GFAP- | Modified | Blunt- | [ademAs-C16][mG][mG][mA][mU][mC][mU][fA] | 773 |
| 1147 | 20 mer sense | End P1 | [fC][fU][fC][mA][mA][mC][mG][mU][mU][mAs] | |
| | strand | C16 | [mAs][mA] | |
| GFAP- | Modified | Blunt- | [mAs][mG][mG][ademA-C16][mU][mC][mU][fA] | 774 |
| 1147 | 20 mer sense | End | [fC][fU][fC][mA][mA][mC][mG][mU][mU][mAs] | |
| | strand | P4 C16 | [mAs][mA] | |
| GFAP- | Modified | Blunt- | [mAs][mG][mG][mA][mU][mC][mU][ademA- | 775 |
| | 20 mer sense | End | C16] | |
| 1147 | strand | P8 C16 | [fC][fU][fC][mA][mA][mC][mG][mU][mU][mAs] | |
| | | | [mAs][mA] | |
| GFAP- | Modified | Blunt- | [mAs][mG][mG][mA][mU][mC][mU][fA][fC][fU] | 776 |
| 1147 | 20 mer sense | End | [fC][ademA-C16][mA][mC][mG][mU][mU][mAs] | |
| | strand | P12 | [mAs][mA] | |
| | | C16 | | |
| GFAP- | Modified | Blunt- | [mAs][mG][mG][mA][mU][mC][mU][fA][fC][fU] | 777 |
| 1147 | 20 mer sense | End | [fC][mA][ademA-C16][mC][mG][mU][mU][mAs] | |
| | strand | P13 | [mAs][mA] | |
| | | C16 | | |
| GFAP- | Modified | Blunt- | [mAs][mG][mG][mA][mU][mC][mU][fA][fC][fU] | 778 |
| 1147 | 20 mer sense | End | [fC][mA][mA][mC][mG][mU][mU][ademAs-C16] | |
| | strand | P18 | [mAs][mA] | |
| | | C16 | | |
| GFAP- | Modified | Blunt- | [mAs][mG][mG][mA][mU][mC][mU][fA][fC][fU] | 779 |
| 1147 | 20 mer sense | End | [fC][mA][mA][mC][mG][mU][mU][mAs][ademAs- | |
| | strand | P19 | C16][mA] | |
| | | C16 | | |
| GFAP- | Modified | Blunt- | [mAs][mG][mG][mA][mU][mC][mU][fA][fC][fU] | 780 |
| 1147 | 20 mer sense | End | [fC][mA][mA][mC][mG][mU][mU][mAs][mAs] | |
| | strand | P20 | [ademA-C16] | |
| | | C16 | | |
| Trans- | GFAP | N/A | AGAGCCAGAGCAGGATGGAGAGGAGACGC | 781 |
| cript | Transcript | | ATCACCTCCGCTGCTCGCCGCTCCTACGTCT | |
| Variant | variant 1 | | CCTCAGGGGAGATGATGGTGGGGGGCCTGG | |
| 1 | | | CTCCTGGCCGCCGTCTGGGTCCTGGCACCC | |
| | | | GCCTCTCCCTGGCTCGAATGCCCCCTCCACT | |
| | | | CCCGACCCGGGTGGATTTCTCCCTGGCTGG | |
| | | | GGCACTCAATGCTGGCTTCAAGGAGACCCG | |
| | | | GGCCAGTGAGCGGGCAGAGATGATGGAGC | |
| | | | TCAATGACCGCTTTGCCAGCTACATCGAGA | |
| | | | AGGTTCGCTTCCTGGAACAGCAAAACAAGG | |
| | | | CGCTGGCTGCTGAGCTGAACCAGCTGCGGG | |
| | | | CCAAGGAGCCCACCAAGCTGGCAGACGTCT | |
| | | | ACCAGGCTGAGCTGCGAGAGCTGCGGCTGC | |
| | | | GGCTCGATCAACTCACCGCCAACAGCGCCC | |
| | | | GGCTGGAGGTTGAGAGGGACAATCTGGCAC | |
| | | | AGGACCTGGCCACTGTGAGGCAGAAGCTCC | |
| | | | AGGATGAAACCAACCTGAGGCTGGAAGCC | |
| | | | GAGAACAACCTGGCTGCCTATAGACAGGAA | |
| | | | GCAGATGAAGCCACCCTGGCCCGTCTGGAT | |
| | | | CTGGAGAGGAAGATTGAGTCGCTGGAGGA | |
| | | | GGAGATCCGGTTCTTGAGGAAGATCCACGA | |
| | | | GGAGGAGGTTCGGGAACTCCAGGAGCAGC | |
| | | | TGGCCCGACAGCAGGTCCATGTGGAGCTTG | |
| | | | ACGTGGCCAAGCCAGACCTCACCGCAGCCC | |
| | | | TGAAAGAGATCCGCACGCAGTATGAGGCA | |
| | | | ATGGCGTCCAGCAACATGCATGAAGCCGAA | |
| | | | GAGTGGTACCGCTCCAAGTTTGCAGACCTG | |
| | | | ACAGACGCTGCTGCCCGCAACGCGGAGCTG | |
| | | | CTCCGCCAGGCCAAGCACGAAGCCAACGAC | |
| | | | TACCGGCGCCAGTTGCAGTCCTTGACCTGC | |
| | | | GACCTGGAGTCTCTGCGCGGCACGAACGAG | |
| | | | TCCCTGGAGAGGCAGATGCGCGAGCAGGA | |
| | | | GGAGCGGCACGTGCGGGAGGCGGCCAGTT | |
| | | | ATCAGGAGGCGCTGGCGCGGCTGGAGGAA | |
| | | | GAGGGGCAGAGCCTCAAGGACGAGATGGC | |
| | | | CCGCCACTTGCAGGAGTACCAGGACCTGCT | |
| | | | CAATGTCAAGCTGGCCCTGGACATCGAGAT | |
| | | | CGCCACCTACAGGAAGCTGCTAGAGGGCGA | |
| | | | GGAGAACCGGATCACCATTCCCGTGCAGAC | |
| | | | CTTCTCCAACCTGCAGATTCGAGAAACCAG | |
| | | | CCTGGACACCAAGTCTGTGTCAGAAGGCCA | |
| | | | CCTCAAGAGGAACATCGTGGTGAAGACCGT | |
| | | | GGAGATGCGGGATGGAGAGGTCATTAAGG | |
| | | | AGTCCAAGCAGGAGCACAAGGATGTGATGT | |
| | | | GAGGCAGGACCCACCTGGTGGCCTCTGCCC | |
| | | | CGTCTCATGAGGGGCCCGAGCAGAAGCAG | |
| | | | GATAGTTGCTCCGCCTCTGCTGGCACATTTC | |
| | | | CCCAGACCTGAGCTCCCCACCACCCCAGCT | |
| | | | GCTCCCCTCCCTCCTCTGTCCCTAGGTCAGC | |
| | | | TTGCTGCCCTAGGCTCCGTCAGTATCAGGC | |
| | | | CTGCCAGACGGCACCCACCCAGCACCCAGC | |
| | | | AACTCCAACTAACAAGAAACTCACCCCCAA | |
| | | | GGGGCAGTCTGGAGGGGCATGGCCAGCAG | |
| | | | CTTGCGTTAGAATGAGGAGGAAGGAGAGA | |
| | | | AGGGGAGGAGGGCGGGGGGCACCTACTAC | |
| | | | ATCGCCCTCCACATCCCTGATTCCTGTTGTT | |
| | | | ATGGAAACTGTTGCCAGAGATGGAGGTTCT | |
| | | | CTCGGAGTATCTGGGAACTGTGCCTTTGAG | |
| | | | TTTCCTCAGGCTGCTGGAGGAAAACTGAGA | |
| | | | CTCAGACAGGAAAGGGAAGGCCCCACAGA | |
| | | | CAAGGTAGCCCTGGCCAGAGGCTTGTTTTG | |
| | | | TCTTTTGGTTTTTATGAGGTGGGATATCCCT | |
| | | | ATGCTGCCTAGGCTGACCTTGAACTCCTGG | |
| | | | GCTCAAGCAGTCTACCCACCTCAGCCTCCT | |
| | | | GTGTAGCTGGGATTATAGATTGGAGCCACC | |
| | | | ATGCCCAGCTCAGAGGGTTGTTCTCCTAGA | |
| | | | CTGACCCTGATCAGTCTAAGATGGGTGGGG | |
| | | | ACGTCCTGCCACCTGGGGCAGTCACCTGCC | |
| | | | CAGATCCCAGAAGGACCTCCTGAGCGATGA | |
| | | | CTCAAGTGTCTCAGTCCACCTGAGCTGCCA | |
| | | | TCCAGGGATGCCATCTGTGGGCACGCTGTG | |
| | | | GGCAGGTGGGAGCTTGATTCTCAGCACTTG | |
| | | | GGGGATCTGTTGTGTACGTGGAGAGGGATG | |
| | | | AGGTGCTGGGAGGGATAGAGGGGGGCTGC | |
| | | | CTGGCCCCCAGCTGTGGGTACAGAGAGGTC | |
| | | | AAGCCCAGGAGGACTGCCCCGTGCAGACTG | |
| | | | GAGGGGACGCTGGTAGAGATGGAGGAGGA | |
| | | | GGCAATTGGGATGGCGCTAGGCATACAAGT | |
| | | | AGGGGTTGTGGGTGACCAGTTGCACTTGGC | |
| | | | CTCTGGATTGTGGGAATTAAGGAAGTGACT | |
| | | | CATCCTCTTGAAGATGCTGAAACAGGAGAG | |
| | | | AAAGGGGATGTATCCATGGGGGCAGGGCA | |
| | | | TGACTTTGTCCCATTTCTAAAGGCCTCTTCC | |
| | | | TTGCTGTGTCATACCAGGCCGCCCCAGCCT | |
| | | | CTGAGCCCCTGGGACTGCTGCTTCTTAACCC | |
| | | | CAGTAAGCCACTGCCACACGTCTGACCCTC | |
| | | | TCCACCCCATAGTGACCGGCTGCTTTTCCCT | |
| | | | AAGCCAAGGGCCTCTTGCGGTCCCTTCTTA | |
| | | | CTCACACACAAAATGTACCCAGTATTCTAG | |
| | | | GTAGTGCCCTATTTTACAATTGTAAAACTG | |
| | | | AGGCACGAGCAAAGTGAAGACACTGGCTC | |
| | | | ATATTCCTGCAGCCTGGAGGCCGGGTGCTC | |
| | | | AGGGCTGACACGTCCACCCCAGTGCACCCA | |
| | | | CTCTGCTTTGACTGAGCAGACTGGTGAGCA | |
| | | | GACTGGTGGGATCTGTGCCCAGAGATGGGA | |
| | | | CTGGGAGGGCCCACTTCAGGGTTCTCCTCT | |
| | | | CCCCTCTAAGGCCGAAGAAGGGTCCTTCCC | |
| | | | TCTCCCCAAGACTTGGTGTCCTTTCCCTCCA | |
| | | | CTCCTTCCTGCCACCTGCTGCTGCTGCTGCT | |
| | | | GCTAATCTTCAGGGCACTGCTGCTGCCTTTA | |
| | | | GTCGCTGAGGAAAAATAAAGACAAATGCT | |
| | | | GCGCCCTTCCCCAGAGTGGACTCTGATCTG | |
| | | | TTCATGAGAGGGCGGGACTGGGGCCAAGAT | |
| | | | GTAGCCTTTGACAAGACCAACTCATTTCTTA | |
| | | | TTACTGATCATCTCTGGGGCCCATGCCCTCA | |
| | | | CCAAATTCCACCCGCAGCCAAAGAGGACAT | |
| | | | ACACCAGCTCCCTCCACTCTTTTCTTCCTTC | |
| | | | CTCTCCCTGCTACCTGCAACTCAACCAGCA | |
| | | | CAATCTTCATAGGCAAGAAAGCAAAGCAGC | |
| | | | TCAAACATGATTCAACACTGATCAGTGTTT | |
| | | | ACCACTGGATAAATCTGAGTTCACACTTTC | |
| | | | CTTCTCTGACCTAAATGTGAAGTCAGGAAA | |
| | | | CACATGTGCCCTACTTCCATCCTGAGCTCAG | |
| | | | TCCCCAATCTCCCACCAGCCTCAGGCCCCTC | |
| | | | CACTTCTCAGATCAGGTCCCAGACCTGCCC | |
| | | | ATGAAAATGGGGAGCAGGCTGTAACAGATT | |
| | | | TGTCCACATGTTCCTACCACCTGTCCCAACC | |
| | | | CAGGGTACCCACCCAGAGACATCTGGTATC | |
| | | | ATTTAACAAACACATTGAAGGACAACTGGT | |
| | | | CTTCAGAGCTGAAGAGAGCTCCTAGGGGGA | |
| | | | GAAGCTGGGACAACAGTGAAATAAGTAGC | |
| | | | AGCAGCAACGACAGAAGTGAATGGTGACA | |
| | | | AAGACTGCTGTGATGAGCAGGTAGCCTATC | |
| | | | AGGGTGAGCTCCACAGCCGAGCGAGTCTCA | |
| | | | GGATCTGAGAACGAGGCTGGGTAGTGCCCA | |
| | | | TGAGATGTCACACCCAGCCGGAAGCCAGCA | |
| | | | ACTAGCACACCCTGCCTCCAGCAATAGTAG | |
| | | | ATGCCCCGGTCATCCAGCTGGGTGAAGCGG | |
| | | | ATGTGGAGCTGGTTGCCGTGGTCAATGAAC | |
| | | | ACCCTCATGGACCTGTTGACACCCTTCAGG | |
| | | | TACTGTGTGCGGTAGAGGTGCTGGCGGTCT | |
| | | | TTGTCCCAGGCCACTGCATGCTCTGGCCGG | |
| | | | GCCCCAGGACAGGAGATGATGAGTCCATGG | |
| | | | CCCAGTCTCTGCTGGTGGAACTGAATGGGC | |
| | | | ACCTGGGGCACCCAGGGCCGGCTGCCCACT | |
| | | | TTGGACACATAGTTAATGATGGCCAGCACG | |
| | | | CCCTCCCGGATGGTCTTTGTCTTCTCACAGG | |
| | | | GTACTAAGCAGCTCCGAACCAGCACCTCAG | |
| | | | GCGTGTGGTCCCTGGCCTTGGTCCGCAGCTT | |
| | | | CCTTGGCACAGCCCTTGAGCCACAAGACAC | |
| | | | CACATCGGGCACGGCCTTGAGGTAGCGTGG | |
| | | | GGAGAGGTCTGGGCTCTGCAGGTAGCAGAG | |
| | | | GCCGATGCGCCACTGCTCCCCACGCACTCC | |
| | | | GCAGCGGTCACAGGGGGTCCATTCCCAGAA | |
| | | | GGTGGTGAAGACATGGAGGTGCCCATAGTA | |
| | | | TTCATCTGCAAAGGGCTCCTGGCCCTTGTCC | |
| | | | TGGAAAGTGGCCACCATTCCCTCACTGTTCT | |
| | | | GGATGTCCACATCGTAGGCGTAAAAGTAGT | |
| | | | CCCCCTTGCGGGTGCCGCAGAAGTACAGGC | |
| | | | CTGAGTCCTCAGACTGAGCCCTGAAAACCA | |
| | | | ACAAGCTGAACATGCGGATGCTGAAGCGG | |
| | | | GTCAGCATGTCGCTGCCCACACGTACCTGG | |
| | | | GCTGCCTCCGTCAGCACCCGCCCATCAAAG | |
| | | | TCCGTCAGCACTTTGGTGTGGCTGCTACCTA | |
| | | | GGTGCTTTTGGTAGAACCAGACTACAGCTG | |
| | | | GCACCTCTTCGGGTTTGCAGTGACAGGGAA | |
| | | | GCTCAAAGCTCATGTCGGCCAGGTAGGCTG | |
| | | | CATTTTCAAACATCAGGAAAGCAGGGCAGG | |
| | | | GGGTCCTCTGAAAAATGTTTTCCTTCTCCAC | |
| | | | AATTTCAAAGGCCTGGAGCCCCCATGCCCA | |
| | | | CAGGAGCACAGTGGTGAGGGCCAGGTGCA | |
| | | | TACCTGAAGGAGGCAGGGGTCAGAGGGGC | |
| | | | AGGGCAAAACCAGGGCATTAAAGGCTCAT | |
| | | | AGGGCTCCTAGAAAGCTCTGCTAAGCGGAA | |
| | | | GCCTCTAGATGAGGAAAGGATTATGCAGCC | |
| | | | AGGAAAAGCAGCAACAATCTGCAGAGGAA | |
| | | | GCCGCCAAGTGCAAGGCAATTTATTCCCAG | |
| | | | TGGATGTACAAGATGCCCTTCTAACATTCC | |
| | | | AGACCTGATCTCAGGGTGGGGGGGGAAAG | |
| | | | CCATTCTAGAACCTGGCCTTTACTCCCCTTT | |
| | | | CTAGAACACTGGCGCTCACCCAAGAATGGG | |
| | | | TCAAAGGAAACCGGAATGAGAAGGGCGGG | |
| | | | CCGAGGTGCTCGGGCAGGGAGATCTCTGCC | |
| | | | TCAGTGCTCCAGGCCCTGCCCTGCCAGCCT | |
| | | | GGTGGAAAAGTCTTTCATCAACCTGGGGGA | |
| | | | TGAAGGAAACCCACCCTCCTGCATATCTGG | |
| | | | CCATCCGGGAGGCTGGCTGGACCTGAGCTG | |
| | | | ATGGCTTGGGACTTTCCCAGGCCCAACCTG | |
| | | | CACAAGAACTGAGTCTCTAGGGGAAAATTC | |
| | | | AACACCTCAAATGATGTAGTATTTGATCAT | |
| | | | TTGTTGATTACATGTCCATTCATTGGTTTGG | |
| | | | GGCTATAAACATTCTTGTTAAGAGCTGTGG | |
| | | | AGATCAGTGTTTGTTTACCATAAAGATTTTG | |
| | | | CTTTTTCCCTTTTA | |
| Trans- | GFAP | N/A | AGAGCCAGAGCAGGATGGAGAGGAGACGC | 782 |
| cript | Transcript | | ATCACCTCCGCTGCTCGCCGCTCCTACGTCT | |
| variant | variant 4 | | CCTCAGGGGAGATGATGGTGGGGGGCCTGG | |
| 2 | | | CTCCTGGCCGCCGTCTGGGTCCTGGCACCC | |
| | | | GCCTCTCCCTGGCTCGAATGCCCCCTCCACT | |
| | | | CCCGACCCGGGTGGATTTCTCCCTGGCTGG | |
| | | | GGCACTCAATGCTGGCTTCAAGGAGACCCG | |
| | | | GGCCAGTGAGCGGGCAGAGATGATGGAGC | |
| | | | TCAATGACCGCTTTGCCAGCTACATCGAGA | |
| | | | AGGTTCGCTTCCTGGAACAGCAAAACAAGG | |
| | | | CGCTGGCTGCTGAGCTGAACCAGCTGCGGG | |
| | | | CCAAGGAGCCCACCAAGCTGGCAGACGTCT | |
| | | | ACCAGGCTGAGCTGCGAGAGCTGCGGCTGC | |
| | | | GGCTCGATCAACTCACCGCCAACAGCGCCC | |
| | | | GGCTGGAGGTTGAGAGGGACAATCTGGCAC | |
| | | | AGGACCTGGCCACTGTGAGGCAGAAGCTCC | |
| | | | AGGATGAAACCAACCTGAGGCTGGAAGCC | |
| | | | GAGAACAACCTGGCTGCCTATAGACAGGAA | |
| | | | GCAGATGAAGCCACCCTGGCCCGTCTGGAT | |
| | | | CTGGAGAGGAAGATTGAGTCGCTGGAGGA | |
| | | | GGAGATCCGGTTCTTGAGGAAGATCCACGA | |
| | | | GGAGGAGGTTCGGGAACTCCAGGAGCAGC | |
| | | | TGGCCCGACAGCAGGTCCATGTGGAGCTTG | |
| | | | ACGTGGCCAAGCCAGACCTCACCGCAGCCC | |
| | | | TGAAAGAGATCCGCACGCAGTATGAGGCA | |
| | | | ATGGCGTCCAGCAACATGCATGAAGCCGAA | |
| | | | GAGTGGTACCGCTCCAAGTTTGCAGACCTG | |
| | | | ACAGACGCTGCTGCCCGCAACGCGGAGCTG | |
| | | | CTCCGCCAGGCCAAGCACGAAGCCAACGAC | |
| | | | TACCGGCGCCAGTTGCAGTCCTTGACCTGC | |
| | | | GACCTGGAGTCTCTGCGCGGCACGAACGAG | |
| | | | TCCCTGGAGAGGCAGATGCGCGAGCAGGA | |
| | | | GGAGCGGCACGTGCGGGAGGCGGCCAGTT | |
| | | | ATCAGGAGGCGCTGGCGCGGCTGGAGGAA | |
| | | | GAGGGGCAGAGCCTCAAGGACGAGATGGC | |
| | | | CCGCCACTTGCAGGAGTACCAGGACCTGCT | |
| | | | CAATGTCAAGCTGGCCCTGGACATCGAGAT | |
| | | | CGCCACCTACAGGAAGCTGCTAGAGGGCGA | |
| | | | GGAGAACCGGATCACCATTCCCGTGCAGAC | |
| | | | CTTCTCCAACCTGCAGATTCGAGGGGGCAA | |
| | | | AAGCACCAAAGACGGGGAAAATCACAAGG | |
| | | | TCACAAGATATCTCAAAAGCCTCACAATAC | |
| | | | GAGTTATACCAATACAGGCTCACCAGATTG | |
| | | | TAAATGGAACGCCGCCGGCTCGCGGTTAGC | |
| | | | TGCCTGCCTCTCAGACACGGCGCTTTGCCC | |
| | | | AGCTTGACAGGGAGTGAGCCTCACCCACCC | |
| | | | CATCCTCCCAATCCCCCTGAGTTCCCTCTTC | |
| | | | CCAGGCTTCCCCTAAAGGGCCTGGACTGCG | |
| | | | TCATTTTCCCAGGAACTGCAGTGCCCAGCC | |
| | | | CAGGACGTGGTACAGAGTAACTGTACATTA | |
| | | | AACTGGCAGAGCTTGTTAGTGGTAAAGGTG | |
| | | | GTGAGTCCTTGGGTGCGCAGTGGAGCTGCT | |
| | | | CTGGGGCCTCTGAGCAAGCAGCAGCCTCTG | |
| | | | TCTCACCTCTTCCTGTCACTGGGAGGGCCCC | |
| | | | TTGGGTCTCGCTGTGCCTGGACGCCAGGCT | |
| | | | CTCTGCTTTATTCTTTCATCCCTGAGGCTCC | |
| | | | ATCGCTCAGCTCAGTGCTGACTCAGTTCAG | |
| | | | AGGATTCTTCCCTCAGGACCGCAGCTCTTG | |
| | | | CAGTGAATAAAGTTTTATGTTCCCTGCTCTT | |
| | | | AATGTTAAA | |
| Trans- | GFAP | N/A | AGAGCCAGAGCAGGATGGAGAGGAGACGC | 783 |
| cript | Transcript | | ATCACCTCCGCTGCTCGCCGCTCCTACGTCT | |
| variant | variant 3 | | CCTCAGGGGAGATGATGGTGGGGGGCCTGG | |
| 3 | | | CTCCTGGCCGCCGTCTGGGTCCTGGCACCC | |
| | | | GCCTCTCCCTGGCTCGAATGCCCCCTCCACT | |
| | | | CCCGACCCGGGTGGATTTCTCCCTGGCTGG | |
| | | | GGCACTCAATGCTGGCTTCAAGGAGACCCG | |
| | | | GGCCAGTGAGCGGGCAGAGATGATGGAGC | |
| | | | TCAATGACCGCTTTGCCAGCTACATCGAGA | |
| | | | AGGTTCGCTTCCTGGAACAGCAAAACAAGG | |
| | | | CGCTGGCTGCTGAGCTGAACCAGCTGCGGG | |
| | | | CCAAGGAGCCCACCAAGCTGGCAGACGTCT | |
| | | | ACCAGGCTGAGCTGCGAGAGCTGCGGCTGC | |
| | | | GGCTCGATCAACTCACCGCCAACAGCGCCC | |
| | | | GGCTGGAGGTTGAGAGGGACAATCTGGCAC | |
| | | | AGGACCTGGCCACTGTGAGGCAGAAGCTCC | |
| | | | AGGATGAAACCAACCTGAGGCTGGAAGCC | |
| | | | GAGAACAACCTGGCTGCCTATAGACAGGAA | |
| | | | GCAGATGAAGCCACCCTGGCCCGTCTGGAT | |
| | | | CTGGAGAGGAAGATTGAGTCGCTGGAGGA | |
| | | | GGAGATCCGGTTCTTGAGGAAGATCCACGA | |
| | | | GGAGGAGGTTCGGGAACTCCAGGAGCAGC | |
| | | | TGGCCCGACAGCAGGTCCATGTGGAGCTTG | |
| | | | ACGTGGCCAAGCCAGACCTCACCGCAGCCC | |
| | | | TGAAAGAGATCCGCACGCAGTATGAGGCA | |
| | | | ATGGCGTCCAGCAACATGCATGAAGCCGAA | |
| | | | GAGTGGTACCGCTCCAAGTTTGCAGACCTG | |
| | | | ACAGACGCTGCTGCCCGCAACGCGGAGCTG | |
| | | | CTCCGCCAGGCCAAGCACGAAGCCAACGAC | |
| | | | TACCGGCGCCAGTTGCAGTCCTTGACCTGC | |
| | | | GACCTGGAGTCTCTGCGCGGCACGAACGAG | |
| | | | TCCCTGGAGAGGCAGATGCGCGAGCAGGA | |
| | | | GGAGCGGCACGTGCGGGAGGCGGCCAGTT | |
| | | | ATCAGGAGGCGCTGGCGCGGCTGGAGGAA | |
| | | | GAGGGGCAGAGCCTCAAGGACGAGATGGC | |
| | | | CCGCCACTTGCAGGAGTACCAGGACCTGCT | |
| | | | CAATGTCAAGCTGGCCCTGGACATCGAGAT | |
| | | | CGCCACCTACAGGAAGCTGCTAGAGGGCGA | |
| | | | GGAGAACCGGATCACCATTCCCGTGCAGAC | |
| | | | CTTCTCCAACCTGCAGATTCGAGGTCAGTA | |
| | | | CAGCAGGGCCTCGTGGGAAGGGCACTGGA | |
| | | | GTCCTGCCCCCTCCTCCAGGGCCTGTAGGTT | |
| | | | GCTCCAGACTGGGACTGAGGATCAGGGCAA | |
| | | | AGGGATCCAGCTCTCCCTGGGGGCCTTCGT | |
| | | | GACACTGCAGCGCTCCTAGCCAGAGCCTAT | |
| | | | CATACCAGGGTACTTCTAGGTGGGGCTTGC | |
| | | | AGCTGCCCCTGTCCTGCTAGGCCCTGGTCCC | |
| | | | TCTTCCCCTCCCTGCACCCCATTCGACAGCA | |
| | | | GAACTGGGTGAGAGCTTGACATCTGCCCTG | |
| | | | TCTGCAGATCCCTGAGCAAGCACTGCCCTT | |
| | | | CTGAGTGTTTTCTGTTTTTGTTTTTTTAACTG | |
| | | | CTTGTCACTACAGGGGGCAAAAGCACCAAA | |
| | | | GACGGGGAAAATCACAAGGTCACAAGATA | |
| | | | TCTCAAAAGCCTCACAATACGAGTTATACC | |
| | | | AATACAGGCTCACCAGATTGTAAATGGAAC | |
| | | | GCCGCCGGCTCGCGGTTAGCTGCCTGCCTC | |
| | | | TCAGACACGGCGCTTTGCCCAGCTTGACAG | |
| | | | GGAGTGAGCCTCACCCACCCCATCCTCCCA | |
| | | | ATCCCCCTGAGTTCCCTCTTCCCAGGCTTCC | |
| | | | CCTAAAGGGCCTGGACTGCGTCATTTTCCC | |
| | | | AGGAACTGCAGTGCCCAGCCCAGGACGTGG | |
| | | | TACAGAGTAACTGTACATTAAACTGGCAGA | |
| | | | GCTTGTTAGTGGTAAAGGTGGTGAGTCCTT | |
| | | | GGGTGCGCAGTGGAGCTGCTCTGGGGCCTC | |
| | | | TGAGCAAGCAGCAGCCTCTGTCTCACCTCT | |
| | | | TCCTGTCACTGGGAGGGCCCCTTGGGTCTC | |
| | | | GCTGTGCCTGGACGCCAGGCTCTCTGCTTTA | |
| | | | TTCTTTCATCCCTGAGGCTCCATCGCTCAGC | |
| | | | TCAGTGCTGACTCAGTTCAGAGGATTCTTCC | |
| | | | CTCAGGACCGCAGCTCTTGCAGTGAATAAA | |
| | | | GTTTTATGTTCCCTGCTCTTAATGTTAAA | |
| Trans- | GFAP | N/A | AGAGCCAGAGCAGGATGGAGAGGAGACGC | 784 |
| cript | Transcript | | ATCACCTCCGCTGCTCGCCGCTCCTACGTCT | |
| variant | variant 4 | | CCTCAGGGGAGATGATGGTGGGGGGCCTGG | |
| 4 | | | CTCCTGGCCGCCGTCTGGGTCCTGGCACCC | |
| | | | GCCTCTCCCTGGCTCGAATGCCCCCTCCACT | |
| | | | CCCGACCCGGGTGGATTTCTCCCTGGCTGG | |
| | | | GGCACTCAATGCTGGCTTCAAGGAGACCCG | |
| | | | GGCCAGTGAGCGGGCAGAGATGATGGAGC | |
| | | | TCAATGACCGCTTTGCCAGCTACATCGAGA | |
| | | | AGGTTCGCTTCCTGGAACAGCAAAACAAGG | |
| | | | CGCTGGCTGCTGAGCTGAACCAGCTGCGGG | |
| | | | CCAAGGAGCCCACCAAGCTGGCAGACGTCT | |
| | | | ACCAGGCTGAGCTGCGAGAGCTGCGGCTGC | |
| | | | GGCTCGATCAACTCACCGCCAACAGCGCCC | |
| | | | GGCTGGAGGTTGAGAGGGACAATCTGGCAC | |
| | | | AGGACCTGGCCACTGTGAGGCAGAAGCTCC | |
| | | | AGGATGAAACCAACCTGAGGCTGGAAGCC | |
| | | | GAGAACAACCTGGCTGCCTATAGACAGGAA | |
| | | | GCAGATGAAGCCACCCTGGCCCGTCTGGAT | |
| | | | CTGGAGAGGAAGATTGAGTCGCTGGAGGA | |
| | | | GGAGATCCGGTTCTTGAGGAAGATCCACGA | |
| | | | GGAGGAGGTTCGGGAACTCCAGGAGCAGC | |
| | | | TGGCCCGACAGCAGGTCCATGTGGAGCTTG | |
| | | | ACGTGGCCAAGCCAGACCTCACCGCAGCCC | |
| | | | TGAAAGAGATCCGCACGCAGTATGAGGCA | |
| | | | ATGGCGTCCAGCAACATGCATGAAGCCGAA | |
| | | | GAGTGGTACCGCTCCAAGTTTGCAGACCTG | |
| | | | ACAGACGCTGCTGCCCGCAACGCGGAGCTG | |
| | | | CTCCGCCAGGCCAAGCACGAAGCCAACGAC | |
| | | | TACCGGCGCCAGTTGCAGTCCTTGACCTGC | |
| | | | GACCTGGAGTCTCTGCGCGGCACGAACGAG | |
| | | | TCCCTGGAGAGGCAGATGCGCGAGCAGGA | |
| | | | GGAGCGGCACGTGCGGGAGGCGGCCAGTT | |
| | | | ATCAGGAGGCGCTGGCGCGGCTGGAGGAA | |
| | | | GAGGGGCAGAGCCTCAAGGACGAGATGGC | |
| | | | CCGCCACTTGCAGGAGTACCAGGACCTGCT | |
| | | | CAATGTCAAGCTGGCCCTGGACATCGAGAT | |
| | | | CGCCACCTACAGGAAGCTGCTAGAGGGCGA | |
| | | | GGAGAACCGGATCACCATTCCCGTGCAGAC | |
| | | | CTTCTCCAACCTGCAGATTCGAGGGGGCAA | |
| | | | AAGCACCAAAGACGGGGAAAATCACAAGG | |
| | | | TCACAAGATATCTCAAAAGCCTCACAATAC | |
| | | | GAGTTATACCAATACAGGCTCACCAGATTG | |
| | | | TAAATGGAACGCCGCCGGCTCGCGAAACCA | |
| | | | GCCTGGACACCAAGTCTGTGTCAGAAGGCC | |
| | | | ACCTCAAGAGGAACATCGTGGTGAAGACCG | |
| | | | TGGAGATGCGGGATGGAGAGGTCATTAAG | |
| | | | GAGTCCAAGCAGGAGCACAAGGATGTGAT | |
| | | | GTGAGGCAGGACCCACCTGGTGGCCTCTGC | |
| | | | CCCGTCTCATGAGGGGCCCGAGCAGAAGCA | |
| | | | GGATAGTTGCTCCGCCTCTGCTGGCACATTT | |
| | | | CCCCAGACCTGAGCTCCCCACCACCCCAGC | |
| | | | TGCTCCCCTCCCTCCTCTGTCCCTAGGTCAG | |
| | | | CTTGCTGCCCTAGGCTCCGTCAGTATCAGG | |
| | | | CCTGCCAGACGGCACCCACCCAGCACCCAG | |
| | | | CAACTCCAACTAACAAGAAACTCACCCCCA | |
| | | | AGGGGCAGTCTGGAGGGGCATGGCCAGCA | |
| | | | GCTTGCGTTAGAATGAGGAGGAAGGAGAG | |
| | | | AAGGGGAGGAGGGCGGGGGGCACCTACTA | |
| | | | CATCGCCCTCCACATCCCTGATTCCTGTTGT | |
| | | | TATGGAAACTGTTGCCAGAGATGGAGGTTC | |
| | | | TCTCGGAGTATCTGGGAACTGTGCCTTTGA | |
| | | | GTTTCCTCAGGCTGCTGGAGGAAAACTGAG | |
| | | | ACTCAGACAGGAAAGGGAAGGCCCCACAG | |
| | | | ACAAGGTAGCCCTGGCCAGAGGCTTGTTTT | |
| | | | GTCTTTTGGTTTTTATGAGGTGGGATATCCC | |
| | | | TATGCTGCCTAGGCTGACCTTGAACTCCTG | |
| | | | GGCTCAAGCAGTCTACCCACCTCAGCCTCC | |
| | | | TGTGTAGCTGGGATTATAGATTGGAGCCAC | |
| | | | CATGCCCAGCTCAGAGGGTTGTTCTCCTAG | |
| | | | ACTGACCCTGATCAGTCTAAGATGGGTGGG | |
| | | | GACGTCCTGCCACCTGGGGCAGTCACCTGC | |
| | | | CCAGATCCCAGAAGGACCTCCTGAGCGATG | |
| | | | ACTCAAGTGTCTCAGTCCACCTGAGCTGCC | |
| | | | ATCCAGGGATGCCATCTGTGGGCACGCTGT | |
| | | | GGGCAGGTGGGAGCTTGATTCTCAGCACTT | |
| | | | GGGGGATCTGTTGTGTACGTGGAGAGGGAT | |
| | | | GAGGTGCTGGGAGGGATAGAGGGGGGCTG | |
| | | | CCTGGCCCCCAGCTGTGGGTACAGAGAGGT | |
| | | | CAAGCCCAGGAGGACTGCCCCGTGCAGACT | |
| | | | GGAGGGGACGCTGGTAGAGATGGAGGAGG | |
| | | | AGGCAATTGGGATGGCGCTAGGCATACAAG | |
| | | | TAGGGGTTGTGGGTGACCAGTTGCACTTGG | |
| | | | CCTCTGGATTGTGGGAATTAAGGAAGTGAC | |
| | | | TCATCCTCTTGAAGATGCTGAAACAGGAGA | |
| | | | GAAAGGGGATGTATCCATGGGGGCAGGGC | |
| | | | ATGACTTTGTCCCATTTCTAAAGGCCTCTTC | |
| | | | CTTGCTGTGTCATACCAGGCCGCCCCAGCC | |
| | | | TCTGAGCCCCTGGGACTGCTGCTTCTTAACC | |
| | | | CCAGTAAGCCACTGCCACACGTCTGACCCT | |
| | | | CTCCACCCCATAGTGACCGGCTGCTTTTCCC | |
| | | | TAAGCCAAGGGCCTCTTGCGGTCCCTTCTTA | |
| | | | CTCACACACAAAATGTACCCAGTATTCTAG | |
| | | | GTAGTGCCCTATTTTACAATTGTAAAACTG | |
| | | | AGGCACGAGCAAAGTGAAGACACTGGCTC | |
| | | | ATATTCCTGCAGCCTGGAGGCCGGGTGCTC | |
| | | | AGGGCTGACACGTCCACCCCAGTGCACCCA | |
| | | | CTCTGCTTTGACTGAGCAGACTGGTGAGCA | |
| | | | GACTGGTGGGATCTGTGCCCAGAGATGGGA | |
| | | | CTGGGAGGGCCCACTTCAGGGTTCTCCTCT | |
| | | | CCCCTCTAAGGCCGAAGAAGGGTCCTTCCC | |
| | | | TCTCCCCAAGACTTGGTGTCCTTTCCCTCCA | |
| | | | CTCCTTCCTGCCACCTGCTGCTGCTGCTGCT | |
| | | | GCTAATCTTCAGGGCACTGCTGCTGCCTTTA | |
| | | | GTCGCTGAGGAAAAATAAAGACAAATGCT | |
| | | | GCGCCCTTCCCCA | |
| Stem | N/A | N/A | GCAGCCGAAAGGCUGC | 785 |
| Loop | | | | |
| UGT8- | 19 mer sense | N/A | CAAUUAUGUUUGAAAGCCA | 786 |
| 277 | strand | | | |
| UGT8- | 19 mer sense | N/A | AAUUAUGUUUGAAAGCCAU | 787 |
| 278 | strand | | | |
| UGT8- | 19 mer sense | N/A | UUGACAUACUGGAUCACUA | 788 |
| 505 | strand | | | |
| UGT8- | 19 mer sense | N/A | ACAUACUGGAUCACUAUAC | 789 |
| 508 | strand | | | |
| UGT8- | 19 mer sense | N/A | CAUACUGGAUCACUAUACU | 790 |
| 509 | strand | | | |
| UGT8- | 19 mer sense | N/A | CUGGAUCACUAUACUAAGA | 791 |
| 513 | strand | | | |
| UGT8- | 19 mer sense | N/A | AUAUGUGUGGAUUUGUGAU | 792 |
| 616 | strand | | | |
| UGT8- | 19 mer sense | N/A | AGGAUAAUGCAGAAGUACA | 793 |
| 843 | strand | | | |
| UGT8- | 19 mer sense | N/A | AGCAUAGCACAGUUAAUGG | 794 |
| 1726 | strand | | | |
| UGT8- | 19 mer | N/A | UGGCUUUCAAACAUAAUUG | 795 |
| 277 | antisense | | | |
| | strand | | | |
| UGT8- | 19 mer | N/A | AUGGCUUUCAAACAUAAUU | 796 |
| 278 | antisense | | | |
| | strand | | | |
| UGT8- | 19 mer | N/A | UAGUGAUCCAGUAUGUCAA | 797 |
| 505 | antisense | | | |
| | strand | | | |
| UGT8- | 19 mer | N/A | GUAUAGUGAUCCAGUAUGU | 798 |
| 508 | antisense | | | |
| | strand | | | |
| UGT8- | 19 mer | N/A | AGUAUAGUGAUCCAGUAUG | 799 |
| 509 | antisense | | | |
| | strand | | | |
| UGT8- | 19 mer | N/A | UCUUAGUAUAGUGAUCCAG | 800 |
| 513 | antisense | | | |
| | strand | | | |
| UGT8- | 19 mer | N/A | AUCACAAAUCCACACAUAU | 801 |
| 616 | antisense | | | |
| | strand | | | |
| UGT8- | 19 mer | N/A | UGUACUUCUGCAUUAUCCU | 802 |
| 843 | antisense | | | |
| | strand | | | |
| UGT8- | 19 mer | N/A | CCAUUAACUGUGCUAUGCU | 803 |
| 1726 | antisense | | | |
| | strand | | | |
| UGT8- | 36 mer sense | N/A | CAAUUAUGUUUGAAAGCCAAGCAGCCGAA | 804 |
| 277 | strand | | AGGCUGC | |
| UGT8- | 36 mer sense | N/A | AAUUAUGUUUGAAAGCCAUAGCAGCCGAA | 805 |
| 278 | strand | | AGGCUGC | |
| UGT8- | 36 mer sense | N/A | UUGACAUACUGGAUCACUAAGCAGCCGAA | 806 |
| 505 | strand | | AGGCUGC | |
| UGT8- | 36 mer sense | N/A | ACAUACUGGAUCACUAUACAGCAGCCGAA | 807 |
| 508 | strand | | AGGCUGC | |
| UGT8- | 36 mer sense | N/A | CAUACUGGAUCACUAUACUAGCAGCCGAA | 808 |
| 509 | strand | | AGGCUGC | |
| UGT8- | 36 mer sense | N/A | CUGGAUCACUAUACUAAGAAGCAGCCGAA | 809 |
| 513 | strand | | AGGCUGC | |
| UGT8- | 36 mer sense | N/A | AUAUGUGUGGAUUUGUGAUAGCAGCCGAA | 810 |
| 616 | strand | | AGGCUGC | |
| UGT8- | 36 mer sense | N/A | AGGAUAAUGCAGAAGUACAAGCAGCCGAA | 811 |
| 843 | strand | | AGGCUGC | |
| UGT8- | 36 mer sense | N/A | AGCAUAGCACAGUUAAUGGAGCAGCCGAA | 812 |
| 1726 | strand | | AGGCUGC | |
| UGT8- | 22 mer | N/A | UUGGCUUUCAAACAUAAUUGGG | 813 |
| 277 | antisense | | | |
| | strand | | | |
| UGT8- | 22 mer | N/A | UAUGGCUUUCAAACAUAAUUGG | 814 |
| 278 | antisense | | | |
| | strand | | | |
| UGT8- | 22 mer | N/A | UUAGUGAUCCAGUAUGUCAAGG | 815 |
| 505 | antisense | | | |
| | strand | | | |
| UGT8- | 22 mer | N/A | UGUAUAGUGAUCCAGUAUGUGG | 816 |
| 508 | antisense | | | |
| | strand | | | |
| UGT8- | 22 mer | N/A | UAGUAUAGUGAUCCAGUAUGGG | 817 |
| 509 | antisense | | | |
| | strand | | | |
| UGT8- | 22 mer | N/A | UUCUUAGUAUAGUGAUCCAGGG | 818 |
| 513 | antisense | | | |
| | strand | | | |
| UGT8- | 22 mer | N/A | UAUCACAAAUCCACACAUAUGG | 819 |
| 616 | antisense | | | |
| | strand | | | |
| UGT8- | 22 mer | N/A | UUGUACUUCUGCAUUAUCCUGG | 820 |
| 843 | antisense | | | |
| | strand | | | |
| UGT8- | 22 mer | N/A | UCCAUUAACUGUGCUAUGCUGG | 821 |
| 1726 | antisense | | | |
| | strand | | | |
| UGT8- | Modified | Tetraloop | [mCs][mA][mA][mU][mU][mA][mU][fG][fU][fU] | 822 |
| 277 | 36 mer sense | GalNAc | [fU][mG][mA][mA][mA][mG][mC][mC][mA][mA] | |
| | strand | | [mG][mC][mA][mG][mC][mC][mG][ademA- | |
| | | | GalNAc][ademA-GalNAc][ademA- | |
| | | | GalNAc][mG][mG][mC][mU][mG][mC] | |
| UGT8- | Modified | Tetraloop | [mAs][mA][mU][mU][mA][mU][mG][fU][fU][fU] | 823 |
| 278 | 36 mer sense | GalNAc | [fG][mA][mA][mA][mG][mC][mC][mA][mU][mA] | |
| | strand | | [mG][mC][mA][mG][mC][mC][mG][ademA- | |
| | | | GalNAc][ademA-GalNAc][ademA- | |
| | | | GalNAc][mG][mG][mC][mU][mG][mC] | |
| UGT8- | Modified | Tetraloop | [mUs][mU][mG][mA][mC][mA][mU][fA][fC][fU] | 824 |
| 505 | 36 mer sense | GalNAc | [fG][mG][mA][mU][mC][mA][mC][mU][mA][mA] | |
| | strand | | [mG][mC][mA][mG][mC][mC][mG][ademA- | |
| | | | GalNAc][ademA-GalNAc][ademA- | |
| | | | GalNAc][mG][mG][mC][mU][mG][mC] | |
| UGT8- | Modified | Tetraloop | [mAs][mC][mA][mU][mA][mC][mU][fG][fG][fA] | 825 |
| 508 | 36 mer sense | GalNAc | [fU][mC][mA][mC][mU][mA][mU][mA][mC][mA] | |
| | strand | | [mG][mC][mA][mG][mC][mC][mG][ademA- | |
| | | | GalNAc][ademA-GalNAc][ademA- | |
| | | | GalNAc][mG][mG][mC][mU][mG][mC] | |
| UGT8- | Modified | Tetraloop | [mCs][mA][mU][mA][mC][mU][mG][fG][fA][fU] | 826 |
| 509 | 36 mer sense | GalNAc | [fC][mA][mC][mU][mA][mU][mA][mC][mU][mA] | |
| | strand | | [mG][mC][mA][mG][mC][mC][mG][ademA- | |
| | | | GalNAc][ademA-GalNAc][ademA- | |
| | | | GalNAc][mG][mG][mC][mU][mG][mC] | |
| UGT8- | Modified | Tetraloop | [mCs][mU][mG][mG][mA][mU][mC][fA][fC][fU] | 827 |
| 513 | 36 mer sense | GalNAc | [fA][mU][mA][mC][mU][mA][mA][mG][mA][mA] | |
| | strand | | [mG][mC][mA][mG][mC][mC][mG][ademA- | |
| | | | GalNAc][ademA-GalNAc][ademA- | |
| | | | GalNAc][mG][mG][mC][mU][mG][mC] | |
| UGT8- | Modified | Tetraloop | [mAs][mU][mA][mU][mG][mU][mG][fU][fG][fG] | 828 |
| 616 | 36 mer sense | GalNAc | [fA][mU][mU][mU][mG][mU][mG][mA][mU][mA] | |
| | strand | | [mG][mC][mA][mG][mC][mC][mG][ademA- | |
| | | | GalNAc][ademA-GalNAc][ademA- | |
| | | | GalNAc][mG][mG][mC][mU][mG][mC] | |
| UGT8- | Modified | Tetraloop | [mAs][mG][mG][mA][mU][mA][mA][fU][fG][fC] | 829 |
| 843 | 36 mer sense | GalNAc | [fA][mG][mA][mA][mG][mU][mA][mC][mA][mA] | |
| | strand | | [mG][mC][mA][mG][mC][mC][mG][ademA- | |
| | | | GalNAc][ademA-GalNAc][ademA- | |
| | | | GalNAc][mG][mG][mC][mU][mG][mC] | |
| UGT8- | Modified | Tetraloop | [mAs][mG][mC][mA][mU][mA][mG][fC][fA][fC] | 830 |
| 1726 | 36 mer sense | GalNAc | [fA][mG][mU][mU][mA][mA][mU][mG][mG][mA] | |
| | strand | | [mG][mC][mA][mG][mC][mC][mG][ademA- | |
| | | | GalNAc][ademA-GalNAc][ademA- | |
| | | | GalNAc][mG][mG][mC][mU][mG][mC] | |
| UGT8- | Modified | N/A | [MePhosphonate-4O- | 831 |
| 277 | 22 mer | | mUs][fUs][fG][fG][fC][mU][fU][mU][mC][fA] | |
| | antisense | | [mA][mA][mC][fA][mU][mA][mA][mU][mU][mGs] | |
| | strand | | [mGs][mG] | |
| UGT8- | Modified | N/A | [MePhosphonate-4O- | 832 |
| 278 | 22 mer | | mUs][fAs][fU][fG][fG][mC][fU][mU][mU][fC] | |
| | antisense | | [mA][mA][mA][fC][mA][mU][mA][mA][mU][mUs] | |
| | strand | | [mGs][mG] | |
| UGT8- | Modified | N/A | [MePhosphonate-4O- | 833 |
| 505 | 22 mer | | mUs][fUs][fA][fG][fU][mG][fA][mU][mC][fC] | |
| | antisense | | [mA][mG][mU][fA][mU][mG][mU][mC][mA][mAs] | |
| | strand | | [mGs][mG] | |
| UGT8- | Modified | N/A | [MePhosphonate-4O- | 834 |
| 508 | 22 mer | | mUs][fGs][fU][fA][fU][mA][fG][mU][mG][fA] | |
| | antisense | | [mU][mC][mC][fA][mG][mU][mA][mU][mG][mUs] | |
| | strand | | [mGs][mG] | |
| UGT8- | Modified | N/A | [MePhosphonate-4O- | 835 |
| 509 | 22 mer | | mUs][fAs][fG][fU][fA][mU][fA][mG][mU][fG] | |
| | antisense | | [mA][mU][mC][fC][mA][mG][mU][mA][mU][mGs] | |
| | strand | | [mGs][mG] | |
| UGT8- | Modified | N/A | [MePhosphonate-4O- | 836 |
| 513 | 22 mer | | mUs][fUs][fC][fU][fU][mA][fG][mU][mA][fU] | |
| | antisense | | [mA][mG][mU][fG][mA][mU][mC][mC][mA][mGs] | |
| | strand | | [mGs][mG] | |
| UGT8- | Modified | N/A | [MePhosphonate-4O- | 837 |
| 616 | 22 mer | | mUs][fAs][fU][fC][fA][mC][fA][mA][mA][fU] | |
| | antisense | | [mC][mC][mA][fC][mA][mC][mA][mU][mA][mUs] | |
| | strand | | [mGs][mG] | |
| UGT8- | Modified | N/A | [MePhosphonate-4O- | 838 |
| 843 | 22 mer | | mUs][fUs][fG][fU][fA][mC][fU][mU][mC][fU] | |
| | antisense | | [mG][mC][mA][fU][mU][mA][mU][mC][mC][mUs] | |
| | strand | | [mGs][mG] | |
| UGT8- | Modified | N/A | [MePhosphonate-4O- | 839 |
| 1726 | 22 mer | | mUs][fCs][fC][fA][fU][mU][fA][mA] | |
| | antisense | | [mC][fU][mG][mU][mG][fC][mU][mA][mU][mG] | |
| | strand | | [mC][mUs][mGs][mG] | |
| UGT8- | Modified | N/A | [MePhosphonate-4O- | 840 |
| 277 | 22 mer | (three | mUs][fUs][fGs][fG][fC][mU][fU][mU][mC][fA] | |
| | antisense | phosphor- | [mA][mA][mC][fA][mU][mA][mA][mU][mU][mGs] | |
| | strand | othioate | [mGs][mG] | |
| | | linkages) | | |
| UGT8- | Modified | Tetraloop | [mCs][mA][mA][mU][mU][mA][mU][fG][fU][fU] | 841 |
| 277 | 36 mer sense | No | [fU][mG][mA][mA][mA][mG][mC][mC][mA][mA] | |
| | strand | Ligand | [mG][mC][mA][mG][mC][mC][mG][mA][mA] | |
| | | | [mA][mG][mG][mC][mU][mG][mC] | |
| UGT8- | Modified | Tetraloop | [mCs][ademA- | 842 |
| 277 | 36 mer sense | P2 | C16][mA][mU][mU][mA][mU][fG][fU][fU][fU] | |
| | strand | C16 | [mG][mA][mA][mA][mG][mC][mC][mA][mA][mG] | |
| | | | [mC][mA][mG][mC][mC][mG][mA][mA][mA][mG] | |
| | | | [mG][mC][mU][mG][mC] | |
| UGT8- | Modified | Tetraloop | [mCs][mA][ademA- | 843 |
| 277 | 36 mer sense | P3 | C16][mU][mU][mA][mU][fG][fU][fU][fU][mG] | |
| | strand | C16 | [mA][mA][mA][mG][mC][mC][mA][mA][mG][mC] | |
| | | | [mA][mG][mC][mC][mG][mA][mA][mA][mG] | |
| | | | [mG][mC][mU][mG][mC] | |
| UGT8- | Modified | Tetraloop | [mCs][mA][mA][mU][mU][ademA- | 844 |
| 277 | 36 mer sense | P6 | C16][mU][fG][fU][fU][fU][mG][mA][mA][mA] | |
| | strand | C16 | [mG][mC][mC][mA][mA][mG][mC][mA][mG][mC] | |
| | | | [mC][mG][mA][mA][mA][mG][mG][mC][mU] | |
| | | | [mG][mC] | |
| UGT8- | Modified | Tetraloop | [mCs][mA][mA][mU][mU][mA][mU][fG][fU][fU] | 845 |
| 277 | 36 mer sense | P13 | [fU][mG][ademA- | |
| | strand | C16 | C16][mA][mA][mG][mC][mC][mA][mA][mG] | |
| | | | [mC][mA][mG][mC][mC][mG][mA][mA][mA][mG] | |
| | | | [mG][mC][mU][mG][mC] | |
| UGT8- | Modified | Tetraloop | [mCs][mA][mA][mU][mU][mA][mU][fG][fU][fU] | 846 |
| 277 | 36 mer sense | P14 | [fU][mG][mA][ademA- | |
| | strand | C16 | C16][mA][mG][mC][mC][mA][mA][mG][mC] | |
| | | | [mA][mG][mC][mC][mG][mA][mA][mA][mG][mG] | |
| | | | [mC][mU][mG][mC] | |
| UGT8- | Modified | Tetraloop | [mCs][mA][mA][mU][mU][mA][mU][fG][fU][fU] | 847 |
| 277 | 36 mer sense | P15 | [fU][mG][mA][mA][ademA- | |
| | strand | C16 | C16][mG][mC][mC][mA][mA][mG][mC][mA] | |
| | | | [mG][mC][mC][mG][mA][mA][mA][mG][mG][mC] | |
| | | | [mU][mG][mC] | |
| UGT8- | Modified | Tetraloop | [mCs][mA][mA][mU][mU][mA][mU][fG][fU][fU] | 848 |
| 277 | 36 mer sense | P19 | [fU][mG][mA][mA][mA][mG][mC][mC][ademA- | |
| | strand | C16 | C16][mA][mG][mC][mA][mG][mC][mC][mG] | |
| | | | [mA][mA][mA][mG][mG][mC][mU][mG][mC] | |
| UGT8- | Modified | Tetraloop | [mCs][mA][mA][mU][mU][mA][mU][fG][fU][fU] | 849 |
| 277 | 36 mer sense | P20 | [fU][mG][mA][mA][mA][mG][mC][mC][mA] | |
| | strand | C16 | [ademA- | |
| | | | C16][mG][mC][mA][mG][mC][mC][mG][mA] | |
| | | | [mA][mA][mG][mG][mC][mU][mG][mC] | |
| UGT8- | Modified | Tetraloop | [mCs][mA][mA][mU][mU][mA][mU][fG][fU][fU] | 850 |
| 277 | 36 mer sense | P23 | [fU][mG][mA][mA][mA][mG][mC][mC][mA] | |
| | strand | C16 | [mA][mG][mC][ademA- | |
| | | | C16][mG][mC][mC][mG][mA][mA][mA][mG] | |
| | | | [mG][mC][mU][mG][mC] | |
| UGT8- | Modified | Tetraloop | [mCs][mA][mA][mU][mU][mA][mU][fG][fU][fU] | 851 |
| 277 | 36 mer sense | P28 | [fU][mG][mA][mA][mA][mG][mC][mC][mA][mA] | |
| | strand | C16 | [mG][mC][mA][mG][mC][mC][mG][ademA- | |
| | | | C16][mA][mA][mG][mG][mC][mU][mG][mC] | |
| UGT8- | Modified | Tetraloop | [mCs][mA][mA][mU][mU][mA][mU][fG][fU][fU] | 852 |
| 277 | 36 mer sense | P29 | [fU][mG][mA][mA][mA][mG][mC][mC][mA][mA] | |
| | strand | C16 | [mG][mC][mA][mG][mC][mC][mG][mA][ademA- | |
| | | | C16][mA][mG][mG][mC][mU][mG][mC] | |
| UGT8- | Modified | Tetraloop | [mCs][mA][mA][mU][mU][mA][mU][fG][fU][fU] | 853 |
| 277 | 36 mer sense | P30 | [fU][mG][mA][mA][mA][mG][mC][mC][mA][mA] | |
| | strand | C16 | [mG][mC][mA][mG][mC][mC][mG][mA][mA] | |
| | | | [ademA-C16][mG][mG][mC][mU][mG][mC] | |
| UGT8- | Modified | Tetraloop | [ademCs- | 854 |
| 277 | 36 mer sense | P1 | C16][mA][mA][mU][mU][mA][mU][fG][fU][fU] | |
| | strand | AdemC | [fU][mG][mA][mA][mA][mG][mC][mC][mA][mA] | |
| | | C16 | [mG][mC][mA][mG][mC][mC][mG][mA][mA][mA] | |
| | | | [mG][mG][mC][mU][mG][mC] | |
| UGT8- | Modified | Tetraloop | [ademAs- | 855 |
| 277 | 36 mer sense | P1 | C16][mA][mA][mU][mU][mA][mU][fG][fU][fU] | |
| | strand | AdemA | [fU][mG][mA][mA][mA][mG][mC][mC][mA][mA] | |
| | | C16 | [mG][mC][mA][mG][mC][mC][mG][mA][mA][mA] | |
| | | mismatch | [mG][mG][mC][mU][mG][mC] | |
| UGT8- | Unmodified | N/A | CAAUUAUGUUUGAAAGCCAA | 856 |
| 277 | 20 mer sense | | | |
| | strand | | | |
| UGT8- | Modified | Blunt- | [mCs][mA][mA][mU][mU][mA][mU][fG][fU][fU] | 857 |
| 277 | 20 mer sense | End No | [fU][mG][mA][mA][mA][mG][mC][mCs][mAs] | |
| | strand | Ligand | [mA] | |
| UGT8- | Modified | Blunt- | [mCs][ademA- | 858 |
| 277 | 20 mer sense | End P2 | C16][mA][mU][mU][mA][mU][fG][fU][fU][fU] | |
| | strand | C16 | [mG][mA][mA][mA][mG][mC][mCs][mAs][mA] | |
| UGT8- | Modified | Blunt- | [mCs][mA][ademA- | 859 |
| 277 | 20 mer sense | End P3 | C16][mU][mU][mA][mU][fG][fU][fU][fU][mG] | |
| | strand | C16 | [mA][mA][mA][mG][mC][mCs][mAs][mA] | |
| UGT8- | Modified | Blunt- | [mCs][mA][mA][mU][mU][ademA- | 860 |
| 277 | 20 mer sense | End P6 | C16][mU][fG][fU][fU][fU][mG][mA][mA][mA] | |
| | strand | C16 | [mG][mC][mCs][mAs][mA] | |
| UGT8- | Modified | Blunt- | [mCs][mA][mA][mU][mU][mA][mU][fG][fU][fU] | 861 |
| 277 | 20 mer sense | End | [fU][mG][ademA- | |
| | strand | P13 | C16][mA][mA][mG][mC][mCs][mAs][mA] | |
| | | C16 | | |
| UGT8- | Modified | Blunt- | [mCs][mA][mA][mU][mU][mA][mU][fG][fU][fU] | 862 |
| 277 | 20 mer sense | End | [fU][mG][mA][ademA- | |
| | strand | P14 | C16][mA][mG][mC][mCs][mAs][mA] | |
| | | C16 | | |
| UGT8- | Modified | Blunt- | [mCs][mA][mA][mU][mU][mA][mU][fG][fU][fU] | 863 |
| 277 | 20 mer sense | End | [fU][mG][mA][mA][ademA- | |
| | strand | P15 | C16][mG][mC][mCs][mAs][mA] | |
| | | C16 | | |
| UGT8- | Modified | Blunt- | [mCs][mA][mA][mU][mU][mA][mU][fG][fU][fU] | 864 |
| 277 | 20 mer sense | End | [fU][mG][mA][mA][mA][mG][mC][mCs][ademAs- | |
| | strand | P19 | C16][mA] | |
| | | C16 | | |
| UGT8- | Modified | Blunt- | [mCs][mA][mA][mU][mU][mA][mU][fG][fU][fU] | 865 |
| 277 | 20 mer sense | End | [fU][mG][mA][mA][mA][mG][mC][mCs][mAs] | |
| | strand | P20 | [ademA-C16] | |
| | | C16 | | |
| Stem- | Stem-loop | N/A | GCAGCCGAAAGGCUGC | 866 |
| loop | | | | |
| UGT8- | Modified | Blunt- | [ademCs- | 867 |
| 277 | 20 mer sense | End P1 | C16][mA][mA][mU][mU][mA][mU][fG][fU][fU] | |
| | strand | C16 | [fU][mG][mA][mA][mA][mG][mC][mCs][mAs] | |
| | | | [mA] | |
| UGT8- | Modified | Blunt- | [mCs][mA][mA][mU][ademU- | 868 |
| 277 | 20 mer sense | End P5 | C16][mA][mU][fG][fU][fU][fU][mG][mA][mA] | |
| | strand | C16 | [mA][mG][mC][mCs][mAs][mA] | |
| UGT8- | Modified | Blunt- | [mCs][mA][mA][mU][mU][mA][ademU- | 869 |
| 277 | 20 mer sense | End P7 | C16][fG][fU][fU][fU][mG][mA][mA][mA][mG] | |
| | strand | C16 | [mC][mCs][mAs][mA] | |
| UGT8- | Modified | Blunt- | [mCs][mA][mA][mU][mU][mA][mU][fG][ademU- | 870 |
| 277 | 20 mer sense | End P9 | C16][fU][fU][mG][mA][mA][mA][mG][mC][mCs | |
| | strand | C16 | ][mAs][mA] | |
| UGT8- | Modified | Blunt- | [mCs][mA][mA][mU][mU][mA][mU][fG][fU][fU] | 871 |
| 277 | 20 mer sense | End | [ademU- | |
| | strand | P11 | C16][mG][mA][mA][mA][mG][mC][mCs][mAs] | |
| | | C16 | [mA] | |
| UGT8- | Modified | Blunt- | [mCs][mA][mA][mU][mU][mA][mU][fG][fU][fU] | 872 |
| 277 | 20 mer sense | End | [fU][mG][mA][mA][mA][mG][ademC- | |
| | strand | P17 | C16][mCs][mAs][mA] | |
| | | C16 | | |

1.-381. (canceled)

382. A double-stranded oligonucleotide comprising an antisense strand of about 20-22 nucleotides in length and a sense strand of about 18-20 nucleotides in length, wherein the antisense and sense strands form a duplex region of about 18-20 base pairs, wherein the antisense strand comprises an orientation of 5′ to 3′, wherein the antisense strand comprises a 3′ overhang of at least one nucleotide, wherein the antisense strand comprises a region of complementarity to a mRNA target sequence, and wherein the sense strand comprises at least one lipid moiety conjugated to a nucleotide on the sense strand.

383. A double-stranded oligonucleotide comprising an antisense strand of 18-22 nucleotides in length and a sense strand of about 16-20 nucleotides in length, wherein the antisense and sense strands form a duplex region of at least 16-20 base pairs, wherein the antisense strand comprises an orientation of 5′ to 3′, wherein the antisense strand comprises a 5′ overhang of at least one nucleotide, wherein the antisense strand comprises a 3′ overhang of at least one nucleotide, wherein the antisense strand further comprises a region of complementarity to a mRNA target sequence, and wherein the sense strand further comprises at least one lipid moiety conjugated to a nucleotide on the sense strand.

384. The oligonucleotide of claim 382, wherein the lipid moiety is selected from:
a C8-C30 hydrocarbon chain,

[chemical structure]

385. The oligonucleotide claim 382, wherein the lipid moiety is conjugated to at least one of the following positions:
a) the 5′ terminal nucleotide of the sense strand;
b) position 9 of the sense strand; and
c) the 3′ terminal nucleotide of the sense strand,
wherein the positions of the sense strand are numbered starting at the 5′ end to the 3′ end.

386. The oligonucleotide of claim 382, wherein the oligonucleotide comprises at least one modified nucleotide selected from 2′-aminoethyl, 2′-fluoro, 2′-O-methyl, 2′-O-methoxyethyl, or 2′-deoxy-2′-fluoro-β-d-arabinonucleic acid.

387. The oligonucleotide of claim 382, wherein the oligonucleotide comprises at least one modified internucleotide linkage.

388. The oligonucleotide of claim 382, wherein the sense strand comprises at least one Tₘ-increasing nucleotide.

389. The oligonucleotide of claim 382, wherein the lipid moiety is conjugated to the 2′ carbon of the ribose ring of the nucleotide.

390. The oligonucleotide of claim 382, wherein the antisense strand comprises a 4′-O-monomethylphosphonate-2′-O-methyl uridine at the 5′ terminus.

391. The oligonucleotide of claim 382, wherein the 4′-carbon of the sugar of the 5′-nucleotide of the antisense strand comprises a phosphate analog, selected from oxymethyl phosphonate, vinyl phosphonate, or malonyl phosphonate.

392. The oligonucleotide of claim 382, wherein the region of complementarity is fully complementary to the mRNA target sequence.

393. The oligonucleotide of claim 382, wherein the region of complementarity is partially complementary to the mRNA target sequence.

394. The oligonucleotide of claim 393, wherein the region of complementarity comprises no more than four mismatches to the mRNA target sequence.

395. The oligonucleotide of claim 382, wherein the mRNA target sequence is a central nervous system (CNS) target sequence, a neuronal mRNA target sequence, or an ocular mRNA target sequence.

396. The oligonucleotide of claim 382, wherein the mRNA target sequence is a liver mRNA target sequence, a hepatocyte mRNA target sequence, a liver macrophage mRNA target sequence, or a liver sinusoidal endothelial cell mRNA target sequence.

397. A pharmaceutical composition comprising the oligonucleotide of claim 382, and a pharmaceutically acceptable carrier, delivery agent or excipient.

398. A method for treating a subject having a disease, disorder or condition associated with expression of a target mRNA, the method comprising administering to the subject a therapeutically effective amount of the oligonucleotide of claim 382.

399. A method of reducing expression of a target mRNA in a subject, comprising administering to the subject the oligonucleotide of claim 382.

400. A method for treating a subject having a disease, disorder or condition associated with expression of an mRNA of the central nervous system, an mRNA of the liver, or an ocular mRNA, the method comprising administering to the subject a therapeutically effective amount of the oligonucleotide of claim 382.

401. The oligonucleotide of claim 383, wherein the antisense strand is 20 nucleotides in length and the sense strand is 16 nucleotides in length.

402. The oligonucleotide of claim 383, wherein the antisense strand is 22 nucleotides in length and the sense strand is 18 nucleotides in length.

The application's sequence listing, which the Patent Office published only in electronic form, follows.

SEQUENCE LISTING (872 sequences)

SEQ ID NO: 1 - RNA, 36 nt, synthetic construct
  source 1..36: mol_type = other RNA
acagatactctagaacggaagcagccgaaaggctgc

SEQ ID NO: 2 - RNA, 36 nt, synthetic construct
  source 1..36: mol_type = other RNA
attttgtgtactatacctaagcagccgaaaggctgc

SEQ ID NO: 3 - RNA, 36 nt, synthetic construct
  source 1..36: mol_type = other RNA
aggcgcagaattcatctctagcagccgaaaggctgc

SEQ ID NO: 4 - RNA, 22 nt, synthetic construct
  source 1..22: mol_type = other RNA
ttccgttctagagtatctgtgg

SEQ ID NO: 5 - RNA, 22 nt, synthetic construct
  source 1..22: mol_type = other RNA
ttaggtatagtacacaaaatgg

SEQ ID NO: 6 - RNA, 22 nt, synthetic construct
  source 1..22: mol_type = other RNA
tagagatgaattctgcgcctgg

SEQ ID NO: 7 - RNA, 36 nt, synthetic construct; identical to SEQ ID NO: 1
  misc_feature 1^2: note = linked via phosphorothioate
  modified_base 1: mod_base = OTHER; note = docosanamidodiethoxymethanol-adenosine
  modified_base 2: mod_base = cm
  modified_base 3: mod_base = OTHER; note = 2'-O-methyl-adenosine
  modified_base 4: mod_base = gm
  modified_base 5: mod_base = OTHER; note = 2'-O-methyl-adenosine
  modified_base 6: mod_base = um
  modified_base 7: mod_base = OTHER; note = 2'-O-methyl-adenosine
  modified_base 8: mod_base = OTHER; note = 2'-Fluoro-cytidine
  modified_base 9: mod_base = OTHER; note = 2'-Fluoro-uridine
  modified_base 10: mod_base = OTHER; note = 2'-Fluoro-cytidine
  modified_base 11: mod_base = OTHER; note = 2'-Fluoro-uridine
  modified_base 12: mod_base = OTHER; note = 2'-O-methyl-adenosine
  modified_base 13: mod_base = gm
  modified_base 14: mod_base = OTHER; note = 2'-O-methyl-adenosine
  modified_base 15: mod_base = OTHER; note = 2'-O-methyl-adenosine
  modified_base 16: mod_base = cm
  modified_base 17: mod_base = gm
  modified_base 18: mod_base = gm
  modified_base 19: mod_base = OTHER; note = 2'-O-methyl-adenosine
  modified_base 20: mod_base = OTHER; note = 2'-O-methyl-adenosine
  modified_base 21: mod_base = gm
  modified_base 22: mod_base = cm
  modified_base 23: mod_base = OTHER; note = 2'-O-methyl-adenosine
  modified_base 24: mod_base = gm
  modified_base 25: mod_base = cm
  modified_base 26: mod_base = cm
  modified_base 27: mod_base = gm
  modified_base 28: mod_base = OTHER; note = 2'-O-methyl-adenosine
  modified_base 29: mod_base = OTHER; note = 2'-O-methyl-adenosine
  modified_base 30: mod_base = OTHER; note = 2'-O-methyl-adenosine
  modified_base 31: mod_base = gm
  modified_base 32: mod_base = gm
  modified_base 33: mod_base = cm
  modified_base 34: mod_base = um
  modified_base 35: mod_base = gm
  modified_base 36: mod_base = cm
  source 1..36: mol_type = other RNA

SEQ ID NO: 8 - RNA, 36 nt, synthetic construct; identical to SEQ ID NO: 2
  misc_feature 1^2: note = linked via phosphorothioate
  modified_base 1: mod_base = OTHER; note = docosanamidodiethoxymethanol-adenosine
  modified_base 2: mod_base = um
  modified_base 3: mod_base = um
  modified_base 4: mod_base = um
  modified_base 5: mod_base = um
  modified_base 6: mod_base = gm
  modified_base 7: mod_base = um
  modified_base 8: mod_base = OTHER; note = 2'-Fluoro-guanosine
  modified_base 9: mod_base = OTHER; note = 2'-Fluoro-uridine
  modified_base 10: mod_base = OTHER; note = 2'-Fluoro-adenosine
  modified_base 11: mod_base = OTHER; note = 2'-Fluoro-cytidine
  modified_base 12: mod_base = um
  modified_base 13: mod_base = OTHER; note = 2'-O-methyl-adenosine
  modified_base 14: mod_base = um
  modified_base 15: mod_base = OTHER; note = 2'-O-methyl-adenosine
  modified_base 16: mod_base = cm
  modified_base 17: mod_base = cm
  modified_base 18: mod_base = um
  modified_base 19: mod_base = OTHER; note = 2'-O-methyl-adenosine
  modified_base 20: mod_base = OTHER; note = 2'-O-methyl-adenosine
  modified_base 21: mod_base = gm
  modified_base 22: mod_base = cm
  modified_base 23: mod_base = OTHER; note = 2'-O-methyl-adenosine
  modified_base 24: mod_base = gm
  modified_base 25: mod_base = cm
  modified_base 26: mod_base = cm
  modified_base 27: mod_base = gm
  modified_base 28: mod_base = OTHER; note = 2'-O-methyl-adenosine
  modified_base 29: mod_base = OTHER; note = 2'-O-methyl-adenosine
  modified_base 30: mod_base = OTHER; note = 2'-O-methyl-adenosine
  modified_base 31: mod_base = gm
  modified_base 32: mod_base = gm
  modified_base 33: mod_base = cm
  modified_base 34: mod_base = um
  modified_base 35: mod_base = gm
  modified_base 36: mod_base = cm
  source 1..36: mol_type = other RNA

SEQ ID NO: 9 - RNA, 36 nt, synthetic construct; identical to SEQ ID NO: 3
  misc_feature 1^2: note = linked via phosphorothioate
  modified_base 1: mod_base = OTHER; note = docosanamidodiethoxymethanol-adenosine
  modified_base 2: mod_base = gm
  modified_base 3: mod_base = gm
  modified_base 4: mod_base = cm
  modified_base 5: mod_base = gm
  modified_base 6: mod_base = cm
  modified_base 7: mod_base = OTHER; note = 2'-O-methyl-adenosine
  modified_base 8: mod_base = OTHER; note = 2'-Fluoro-guanosine
  modified_base 9: mod_base = OTHER; note = 2'-Fluoro-adenosine
  modified_base 10: mod_base = OTHER; note = 2'-Fluoro-adenosine
  modified_base 11: mod_base = OTHER; note = 2'-Fluoro-uridine
  modified_base 12: mod_base = um
  modified_base 13: mod_base = cm
  modified_base 14: mod_base = OTHER; note = 2'-O-methyl-adenosine
  modified_base 15: mod_base = um
  modified_base 16: mod_base = cm
  modified_base 17: mod_base = um
  modified_base 18: mod_base = cm
  modified_base 19: mod_base = um
  modified_base 20: mod_base = OTHER; note = 2'-O-methyl-adenosine
  modified_base 21: mod_base = gm
  modified_base 22: mod_base = cm
  modified_base 23: mod_base = OTHER; note = 2'-O-methyl-adenosine
  modified_base 24: mod_base = gm
  modified_base 25: mod_base = cm
  modified_base 26: mod_base = cm
  modified_base 27: mod_base = gm
  modified_base 28: mod_base = OTHER; note = 2'-O-methyl-adenosine
  modified_base 29: mod_base = OTHER; note = 2'-O-methyl-adenosine
  modified_base 30: mod_base = OTHER; note = 2'-O-methyl-adenosine
  modified_base 31: mod_base = gm
  modified_base 32: mod_base = gm
  modified_base 33: mod_base = cm
  modified_base 34: mod_base = um
  modified_base 35: mod_base = gm
  modified_base 36: mod_base = cm
  source 1..36: mol_type = other RNA

SEQ ID NO: 10 - RNA, 22 nt, synthetic construct
  misc_feature 1..4: note = linked via phosphorothioate
  modified_base 1: mod_base = OTHER; note = 4'-O-monomethylphosphonate-2'-O-methylmethyluridine
  modified_base 2: mod_base = OTHER; note = 2'-Fluoro-uridine
  modified_base 3: mod_base = OTHER; note = 2'-Fluoro-cytidine
  modified_base 4: mod_base = OTHER; note = 2'-Fluoro-cytidine
  modified_base 5: mod_base = OTHER; note = 2'-Fluoro-guanosine
  modified_base 6: mod_base = um
  modified_base 7: mod_base = OTHER; note = 2'-Fluoro-uridine
  modified_base 8: mod_base = cm
  modified_base 9: mod_base = um
  modified_base 10: mod_base = OTHER; note = 2'-Fluoro-adenosine
  modified_base 11: mod_base = gm
  modified_base 12: mod_base = OTHER; note = 2'-O-methyl-adenosine
  modified_base 13: mod_base = gm
  modified_base 14: mod_base = OTHER; note = 2'-Fluoro-uridine
  modified_base 15: mod_base = OTHER; note = 2'-O-methyl-adenosine
  modified_base 16: mod_base = um
  modified_base 17: mod_base = cm
  modified_base 18: mod_base = um
  modified_base 19: mod_base = gm
  misc_feature 20..22: note = linked via phosphorothioate,
  modified_base 20: mod_base = um
  modified_base 21: mod_base = gm
  modified_base 22: mod_base = gm
  source 1..22: mol_type = other RNA
ttccgttctagagtatctgtgg

SEQ ID NO: 11 - RNA, 22 nt, synthetic construct
  misc_feature 1..4: note = linked via phosphorothioate
  modified_base 1: mod_base = OTHER; note = 4'-O-monomethylphosphonate-2'-O-methylmethyluridine
  modified_base 2: mod_base = OTHER; note = 2'-Fluoro-uridine
  modified_base 3: mod_base = OTHER; note = 2'-Fluoro-adenosine
  modified_base 4: mod_base = OTHER; note = 2'-Fluoro-guanosine
  modified_base 5: mod_base = OTHER; note = 2'-Fluoro-guanosine
  modified_base 6: mod_base = um
  modified_base 7: mod_base = OTHER; note = 2'-Fluoro-adenosine
  modified_base 8: mod_base = um
  modified_base 9: mod_base = OTHER; note = 2'-O-methyl-adenosine
  modified_base 10: mod_base = OTHER; note = 2'-Fluoro-guanosine
  modified_base 11: mod_base = um
  modified_base 12: mod_base = OTHER; note = 2'-O-methyl-adenosine
  modified_base 13: mod_base = cm
  modified_base 14: mod_base = OTHER; note = 2'-Fluoro-adenosine
  modified_base 15: mod_base = cm
  modified_base 16: mod_base = OTHER; note = 2'-O-methyl-adenosine
  modified_base 17: mod_base = OTHER; note = 2'-O-methyl-adenosine
  modified_base 18: mod_base = OTHER; note = 2'-O-methyl-adenosine
  modified_base 19: mod_base = OTHER; note = 2'-O-methyl-adenosine
  misc_feature 20..22: note = linked via phosphorothioate,
  modified_base 20: mod_base = um
  modified_base 21: mod_base = gm
  modified_base 22: mod_base = gm
  source 1..22: mol_type = other RNA
ttaggtatagtacacaaaatgg

SEQ ID NO: 12 - RNA, 22 nt, synthetic construct
  misc_feature 1..4: note = linked via phosphorothioate
  modified_base 1: mod_base = OTHER; note = 4'-O-monomethylphosphonate-2'-O-methylmethyluridine
  modified_base 2: mod_base = OTHER; note = 2'-Fluoro-adenosine
  modified_base 3: mod_base = OTHER; note = 2'-Fluoro-guanosine
  modified_base 4: mod_base = OTHER; note = 2'-Fluoro-adenosine
  modified_base 5: mod_base = OTHER; note = 2'-Fluoro-guanosine
  modified_base 6: mod_base = OTHER; note = 2'-O-methyl-adenosine
  modified_base 7: mod_base = OTHER; note = 2'-Fluoro-uridine
  modified_base 8: mod_base = gm
  modified_base 9: mod_base = OTHER; note = 2'-O-methyl-adenosine
  modified_base 10: mod_base = OTHER; note = 2'-Fluoro-adenosine
  modified_base 11: mod_base = um
  modified_base 12: mod_base = um
  modified_base 13: mod_base = cm
  modified_base 14: mod_base = OTHER; note = 2'-Fluoro-uridine
  modified_base 15: mod_base = gm
  modified_base 16: mod_base = cm
  modified_base 17: mod_base = gm
  modified_base 18: mod_base = cm
  modified_base 19: mod_base = cm
  misc_feature 20..22: note = linked via phosphorothioate
  modified_base 20: mod_base = um
  modified_base 21: mod_base = gm
  modified_base 22: mod_base = gm
  source 1..22: mol_type = other RNA
tagagatgaattctgcgcctgg

SEQ ID NO: 13 - RNA, 36 nt, synthetic construct; identical to SEQ ID NO: 3
  source 1..36: mol_type = other RNA

SEQ ID NO: 14 - RNA, 20 nt, synthetic construct
  source 1..20: mol_type = other RNA
aggcgcagaattcatctcta

SEQ ID NO: 15 - RNA, 19 nt, synthetic construct
  source 1..19: mol_type = other RNA
ggcgcagaattcatctcta

SEQ ID NO: 16 - RNA, 18 nt, synthetic construct
  source 1..18: mol_type = other RNA
gcgcagaattcatctcta

SEQ ID NO: 17 - RNA, 17 nt, synthetic construct
  source 1..17: mol_type = other RNA
cgcagaattcatctcta

SEQ ID NO: 18 - RNA, 16 nt, synthetic construct
  source 1..16: mol_type = other RNA
gcagaattcatctcta

SEQ ID NO: 19 - RNA, 15 nt, synthetic construct
  source 1..15: mol_type = other RNA
cagaattcatctcta

SEQ ID NO: 20 - RNA, 17 nt, synthetic construct
  source 1..17: mol_type = other RNA
ggcgcagaattcatctc

SEQ ID NO: 21 - RNA, 16 nt, synthetic construct
  source 1..16: mol_type = other RNA
gcgcagaattcatctc

SEQ ID NO: 22 - RNA, 15 nt, synthetic construct
  source 1..15: mol_type = other RNA
cgcagaattcatctc

SEQ ID NO: 23 - RNA, 14 nt, synthetic construct
  source 1..14: mol_type = other RNA
gcagaattcatctc

SEQ ID NO: 24 - RNA, 13 nt, synthetic construct
  source 1..13: mol_type = other RNA
cagaattcatctc

SEQ ID NO: 25 - RNA, 17 nt, synthetic construct
  source 1..17: mol_type = other RNA
ggcgcagaattcatctc

SEQ ID NO: 26 - RNA, 16 nt, synthetic construct
  source 1..16: mol_type = other RNA
gcgcagaattcatctc

SEQ ID NO: 27 - RNA, 15 nt, synthetic construct
  source 1..15: mol_type = other RNA
cgcagaattcatctc

SEQ ID NO: 28 - RNA, 22 nt, synthetic construct
  source 1..22: mol_type = other RNA
tagagatgaattctgcgcctgg

SEQ ID NO: 29 - RNA, 22 nt, synthetic construct
  source 1..22: mol_type = other RNA
tagagatgaattctgcgcctgg

SEQ ID NO: 30 - RNA, 22 nt, synthetic construct
  source 1..22: mol_type = other RNA
tagagatgaattctgcgcctgg

SEQ ID NO: 31 - RNA, 22 nt, synthetic construct
  source 1..22: mol_type = other RNA
tagagatgaattctgcgcctgg

SEQ ID NO: 32 - RNA, 15 nt, synthetic construct
  source 1..15: mol_type = other RNA
cgcagaattcatctc

SEQ ID NO: 33 - RNA, 14 nt, synthetic construct
  source 1..14: mol_type = other RNA
gcagaattcatctc

SEQ ID NO: 34 - RNA, 13 nt, synthetic construct
  source 1..13: mol_type = other RNA
cagaattcatctc

SEQ ID NO: 35 - DNA, 17 bp, synthetic construct
  misc_feature 1..13: note = RNA fragment
  misc_feature 14: note = DNA fragment
  misc_feature 15..17: note = RNA fragment
  source 1..17: mol_type = other DNA
ggcgcagaattcatctc

SEQ ID NO: 36 - DNA, 16 bp, synthetic construct
  misc_feature 1..12: note = RNA fragment
  misc_feature 13: note = DNA fragment
  misc_feature 14..16: note = RNA fragment
  source 1..16: mol_type = other DNA
gcgcagaattcatctc

SEQ ID NO: 37 - DNA, 15 bp, synthetic construct
  misc_feature 1..11: note = RNA fragment
  misc_feature 12: note = DNA fragment
  misc_feature 13..15: note = RNA fragment
  source 1..15: mol_type = other DNA
cgcagaattcatctc

SEQ ID NO: 38 - DNA, 14 bp, synthetic construct
  misc_feature 1..10: note = RNA fragment
  misc_feature 11: note = DNA fragment
  misc_feature 12..14: note = RNA fragment
  source 1..14: mol_type = other DNA
gcagaattcatctc

SEQ ID NO: 39 - DNA, 13 bp, synthetic construct
  misc_feature 1..9: note = RNA fragment
  misc_feature 10: note = DNA fragment
  misc_feature 11..13: note = RNA fragment
  source 1..13: mol_type = other DNA
cagaattcatctc

SEQ ID NO: 40 - DNA, 16 bp, synthetic construct
  misc_feature 1..13: note = RNA fragment
  misc_feature 14: note = DNA fragment
  misc_feature 15..16: note = RNA fragment
  source 1..16: mol_type = other DNA
ggcgcagaattcatct

SEQ ID NO: 41 - DNA, 15 bp, synthetic construct
  misc_feature 1..12: note = RNA fragment
  misc_feature 13: note = DNA fragment
  misc_feature 14..15: note = RNA fragment
  source 1..15: mol_type = other DNA
gcgcagaattcatct

SEQ ID NO: 42 - DNA, 14 bp, synthetic construct
  misc_feature 1..11: note = RNA fragment
  misc_feature 12: note = DNA fragment
  misc_feature 13..14: note = RNA fragment
  source 1..14: mol_type = other DNA
cgcagaattcatct

SEQ ID NO: 43 - DNA, 13 bp, synthetic construct
  misc_feature 1..10: note = RNA fragment
  misc_feature 11: note = DNA fragment
  misc_feature 12..13: note = RNA fragment
  source 1..13: mol_type = other DNA
gcagaattcatct

SEQ ID NO: 44 - DNA, 12 bp, synthetic construct
  misc_feature 1..9: note = RNA fragment
  misc_feature 10: note = DNA fragment
  misc_feature 11..12: note = RNA fragment
  source 1..12: mol_type = other DNA
cagaattcatct

SEQ ID NO: 45 - DNA, 15 bp, synthetic construct
  misc_feature 1..13: note = RNA fragment
  misc_feature 14: note = DNA fragment
  misc_feature 15: note = RNA fragment
  source 1..15: mol_type = other DNA
ggcgcagaattcatc

SEQ ID NO: 46 - DNA, 14 bp, synthetic construct
  misc_feature 1..12: note = RNA fragment
  misc_feature 13: note = DNA fragment
  misc_feature 14: note = RNA fragment
  source 1..14: mol_type = other DNA
gcgcagaattcatc

SEQ ID NO: 47 - DNA, 13 bp, synthetic construct
  misc_feature 1..11: note = RNA fragment
  misc_feature 12: note = DNA fragment
  misc_feature 13: note = RNA fragment
  source 1..13: mol_type = other DNA
cgcagaattcatc

SEQ ID NO: 48 - DNA, 12 bp, synthetic construct
  misc_feature 1..10: note = RNA fragment
  misc_feature 11: note = DNA fragment
  misc_feature 12: note = RNA fragment
  source 1..12: mol_type = other DNA
gcagaattcatc

SEQ ID NO: 49 - DNA, 11 bp, synthetic construct
  misc_feature 1..9: note = RNA fragment
  misc_feature 10: note = DNA fragment
  misc_feature 11: note = RNA fragment
  source 1..11: mol_type = other DNA
cagaattcatc

SEQ ID NO: 50 - DNA, 10 bp, synthetic construct
  misc_feature 1..8: note = RNA fragment
  misc_feature 9: note = DNA fragment
  misc_feature 10: note = RNA fragment
  source 1..10: mol_type = other DNA
agaattcatc

SEQ ID NO: 51-52 - skipped (2 entries)

SEQ ID NO: 53 - RNA, 20 nt, synthetic construct
  source 1..20: mol_type = other RNA
aggcgcagaattcatctcta

SEQ ID NO: 54 - RNA, 31 nt, synthetic construct
  source 1..31: mol_type = other RNA
cagaattcatctctagcagccgaaaggctgc

SEQ ID NO: 55 - RNA, 31 nt, synthetic construct; identical to SEQ ID NO: 54
  source 1..31: mol_type = other RNA

SEQ ID NO: 56 - RNA, 31 nt, synthetic construct; identical to SEQ ID NO: 54
  source 1..31: mol_type = other RNA

SEQ ID NO: 57 - RNA, 31 nt, synthetic construct; identical to SEQ ID NO: 54
  source 1..31: mol_type = other RNA

SEQ ID NO: 58 - RNA, 22 nt, synthetic construct
  source 1..22: mol_type = other RNA
tagagatgaattctgcgcctgg

SEQ ID NO: 59 - RNA, 22 nt, synthetic construct
  source 1..22: mol_type = other RNA
tagagatgaattctgcgcctgg

SEQ ID NO: 60 - RNA, 22 nt, synthetic construct
  source 1..22: mol_type = other RNA
tagagatgaattctgcgcctgg

SEQ ID NO: 61 - RNA, 22 nt, synthetic construct
  source 1..22: mol_type = other RNA
tagagatgaattctgcgcctgg

SEQ ID NO: 62 - RNA, 22 nt, synthetic construct
  source 1..22: mol_type = other RNA
tagagatgaattctgcgcctgg

SEQ ID NO: 63 - RNA, 22 nt, synthetic construct
  source 1..22: mol_type = other RNA
tagagatgaattctgcgcctgg

SEQ ID NO: 64 - RNA, 22 nt, synthetic construct
  source 1..22: mol_type = other RNA
tagagatgaattctgcgcctgg

SEQ ID NO: 65 - RNA, 22 nt, synthetic construct
  source 1..22: mol_type = other RNA
tagagatgaattctgcgcctgg

SEQ ID NO: 66 - RNA, 22 nt, synthetic construct
  source 1..22: mol_type = other RNA
tagagatgaattctgcgcctgg

SEQ ID NO: 67 - RNA, 22 nt, synthetic construct
  source 1..22: mol_type = other RNA
tagagatgaattctgcgcctgg

SEQ ID NO: 68 - RNA, 22 nt, synthetic construct
  source 1..22: mol_type = other RNA
tagagatgaattctgcgcctgg

SEQ ID NO: 69 - RNA, 22 nt, synthetic construct
  source 1..22: mol_type = other RNA
tagagatgaattctgcgcctgg

SEQ ID NO: 70 - RNA, 22 nt, synthetic construct
  source 1..22: mol_type = other RNA
tagagatgaattctgcgcctgg

SEQ ID NO: 71 - RNA, 22 nt, synthetic construct
  source 1..22: mol_type = other RNA
tagagatgaattctgcgcctgg

SEQ ID NO: 72 - RNA, 22 nt, synthetic construct
  source 1..22: mol_type = other RNA
tagagatgaattctgcgcctgg

SEQ ID NO: 73 - RNA, 22 nt, synthetic construct
  source 1..22: mol_type = other RNA
tagagatgaattctgcgcctgg

SEQ ID NO: 74 - RNA, 22 nt, synthetic construct
  source 1..22: mol_type = other RNA
tagagatgaattctgcgcctgg

SEQ ID NO: 75 - RNA, 22 nt, synthetic construct
  source 1..22: mol_type = other RNA
tagagatgaattctgcgcctgg

SEQ ID NO: 76 - RNA, 22 nt, synthetic construct
  source 1..22: mol_type = other RNA
tagagatgaattctgcgcctgg

SEQ ID NO: 77 - RNA, 22 nt, synthetic construct
  source 1..22: mol_type = other RNA
tagagatgaattctgcgcctgg

SEQ ID NO: 78 - RNA, 22 nt, synthetic construct
  source 1..22: mol_type = other RNA
tagagatgaattctgcgcctgg

SEQ ID NO: 79 - RNA, 22 nt, synthetic construct
  source 1..22: mol_type = other RNA
tagagatgaattctgcgcctgg

SEQ ID NO: 80 - RNA, 22 nt, synthetic construct
  source 1..22: mol_type = other RNA
tagagatgaattctgcgcctgg

SEQ ID NO: 81 - RNA, 22 nt, synthetic construct
  source 1..22: mol_type = other RNA
tagagatgaattctgcgcctgg

SEQ ID NO: 82 - RNA, 22 nt, synthetic construct
  source 1..22: mol_type = other RNA
tagagatgaattctgcgcctgg

SEQ ID NO: 83 - RNA, 22 nt, synthetic construct
  source 1..22: mol_type = other RNA
tagagatgaattctgcgcctgg

SEQ ID NO: 84 - RNA, 22 nt, synthetic construct
  source 1..22: mol_type = other RNA
tagagatgaattctgcgcctgg

SEQ ID NO: 85 - RNA, 22 nt, synthetic construct
  source 1..22: mol_type = other RNA
tagagatgaattctgcgcctgg

SEQ ID NO: 86 - RNA, 22 nt, synthetic construct
  source 1..22: mol_type = other RNA
tagagatgaattctgcgcctgg

SEQ ID NO: 87 - RNA, 22 nt, synthetic construct
  source 1..22: mol_type = other RNA
tagagatgaattctgcgcctgg

SEQ ID NO: 88 - RNA, 22 nt, synthetic construct
  source 1..22: mol_type = other RNA
tagagatgaattctgcgcctgg

SEQ ID NO: 89 - RNA, 22 nt, synthetic construct
  source 1..22: mol_type = other RNA
tagagatgaattctgcgcctgg

SEQ ID NO: 90 - RNA, 22 nt, synthetic construct
  source 1..22: mol_type = other RNA
tagagatgaattctgcgcctgg

SEQ ID NO: 91 - RNA, 22 nt, synthetic construct
  source 1..22: mol_type = other RNA
tagagatgaattctgcgcctgg

SEQ ID NO: 92 - RNA, 22 nt, synthetic construct
  source 1..22: mol_type = other RNA
tagagatgaattctgcgcctgg

SEQ ID NO: 93 - RNA, 22 nt, synthetic construct
  source 1..22: mol_type = other RNA
tagagatgaattctgcgcctgg

SEQ ID NO: 94 - RNA, 22 nt, synthetic construct
  source 1..22: mol_type = other RNA
tagagatgaattctgcgcctgg

SEQ ID NO: 95 - RNA, 22 nt, synthetic construct
  source 1..22: mol_type = other RNA
tagagatgaattctgcgcctgg

SEQ ID NO: 96 - RNA, 22 nt, synthetic construct
  source 1..22: mol_type = other RNA
tagagatgaattctgcgcctgg

SEQ ID NO: 97 - RNA, 22 nt, synthetic construct
  source 1..22: mol_type = other RNA
tagagatgaattctgcgcctgg

SEQ ID NO: 98 - RNA, 22 nt, synthetic construct
  source 1..22: mol_type = other RNA
tagagatgaattctgcgcctgg

SEQ ID NO: 99 - RNA, 22 nt, synthetic construct
  source 1..22: mol_type = other RNA
tagagatgaattctgcgcctgg

SEQ ID NO: 100 - RNA, 22 nt, synthetic construct
  source 1..22: mol_type = other RNA
tagagatgaattctgcgcctgg

SEQ ID NO: 101 - RNA, 22 nt, synthetic construct
  source 1..22: mol_type = other RNA
tagagatgaattctgcgcctgg

SEQ ID NO: 102 - RNA, 22 nt, synthetic construct
  source 1..22: mol_type = other RNA
tagagatgaattctgcgcctgg

SEQ ID NO: 103 - RNA, 36 nt, synthetic construct; identical to SEQ ID NO: 3
  misc_feature 1^2: note = linked via phosphorothioate
  modified_base 1: mod_base = OTHER; note = 2'-O-methyl-adenosine
  modified_base 2: mod_base = gm
  modified_base 3: mod_base = gm
  modified_base 4: mod_base = cm
  modified_base 5: mod_base = gm
  modified_base 6: mod_base = cm
  modified_base 7: mod_base = OTHER; note = 2'-O-methyl-adenosine
  modified_base 8: mod_base = OTHER; note = 2'-Fluoro-guanosine
  modified_base 9: mod_base = OTHER; note = 2'-Fluoro-adenosine
  modified_base 10: mod_base = OTHER; note = 2'-Fluoro-adenosine
  modified_base 11: mod_base = OTHER; note = 2'-Fluoro-uridine
  modified_base 12: mod_base = um
  modified_base 13: mod_base = cm
  modified_base 14: mod_base = OTHER; note = 2'-O-methyl-adenosine
  modified_base 15: mod_base = um
  modified_base 16: mod_base = cm
  modified_base 17: mod_base = um
  modified_base 18: mod_base = cm
  modified_base 19: mod_base = um
  modified_base 20: mod_base = OTHER; note = 2'-O-methyl-adenosine
  modified_base 21: mod_base = gm
  modified_base 22: mod_base = cm
  modified_base 23: mod_base = OTHER; note = 2'-O-methyl-adenosine
  modified_base 24: mod_base = gm
  modified_base 25: mod_base = cm
  modified_base 26: mod_base = cm
  modified_base 27: mod_base = gm
  modified_base 28: mod_base = OTHER; note = docosanamidodiethoxymethanol-adenosine
  modified_base 29: mod_base = OTHER; note = 2'-O-methyl-adenosine
  modified_base 30: mod_base = OTHER; note = 2'-O-methyl-adenosine
  modified_base 31: mod_base = gm
  modified_base 32: mod_base = gm
  modified_base 33: mod_base = cm
  modified_base 34: mod_base = um
  modified_base 35: mod_base = gm
  modified_base 36: mod_base = cm
  source 1..36: mol_type = other RNA

SEQ ID NO: 104 - RNA, 20 nt, synthetic construct
  misc_feature 1^2: note = linked via phosphorothioate
  modified_base 1: mod_base = OTHER; note = 2'-O-methyl-adenosine
  modified_base 2: mod_base = gm
  modified_base 3: mod_base = gm
  modified_base 4: mod_base = cm
  modified_base 5: mod_base = gm
  modified_base 6: mod_base = cm
  modified_base 7: mod_base = OTHER; note = docosanamidodiethoxymethanol-adenosine
  modified_base 8: mod_base = OTHER; note = 2'-Fluoro-guanosine
  modified_base 9: mod_base = OTHER; note = 2'-Fluoro-adenosine
  modified_base 10: mod_base = OTHER; note = 2'-Fluoro-adenosine
  modified_base 11: mod_base = OTHER; note = 2'-Fluoro-uridine
  modified_base 12: mod_base = um
  modified_base 13: mod_base = cm
  modified_base 14: mod_base = OTHER; note = 2'-O-methyl-adenosine
  modified_base 15: mod_base = um
  modified_base 16: mod_base = cm
  modified_base 17: mod_base = um
  misc_feature 18..20: note = linked via phosphorothioate
  modified_base 18: mod_base = cm
  modified_base 19: mod_base = um
  modified_base 20: mod_base = OTHER; note = 2'-O-methyl-adenosine
  source 1..20: mol_type = other RNA
aggcgcagaattcatctcta

SEQ ID NO: 105 - RNA, 19 nt, synthetic construct
  misc_feature 1^2: note = linked via phosphorothioate
  modified_base 1: mod_base = gm
  modified_base 2: mod_base = gm
  modified_base 3: mod_base = cm
  modified_base 4: mod_base = gm
  modified_base 5: mod_base = cm
  modified_base 6: mod_base = OTHER; note = docosanamidodiethoxymethanol-adenosine
  modified_base 7: mod_base = OTHER; note = 2'-Fluoro-guanosine
  modified_base 8: mod_base = OTHER; note = 2'-Fluoro-adenosine
  modified_base 9: mod_base = OTHER; note = 2'-Fluoro-adenosine
  modified_base 10: mod_base = OTHER; note = 2'-Fluoro-uridine
  modified_base 11: mod_base = um
  modified_base 12: mod_base = cm
  modified_base 13: mod_base = OTHER; note = 2'-O-methyl-adenosine
  modified_base 14: mod_base = um
  modified_base 15: mod_base = cm
  modified_base 16: mod_base = um
  misc_feature 17..19: note = linked via phosphorothioate
  modified_base 17: mod_base = cm
  modified_base 18: mod_base = um
  modified_base 19: mod_base = OTHER; note = 2'-O-methyl-adenosine
  source 1..19: mol_type = other RNA
ggcgcagaattcatctcta

SEQ ID NO: 106 - RNA, 18 nt, synthetic construct
  misc_feature 1^2: note = linked via phosphorothioate
  modified_base 1: mod_base = gm
  modified_base 2: mod_base = cm
  modified_base 3: mod_base = gm
  modified_base 4: mod_base = cm
  modified_base 5: mod_base = OTHER; note = docosanamidodiethoxymethanol-adenosine
  modified_base 6: mod_base = OTHER; note = 2'-Fluoro-guanosine
  modified_base 7: mod_base = OTHER; note = 2'-Fluoro-adenosine
  modified_base 8: mod_base = OTHER; note = 2'-Fluoro-adenosine
  modified_base 9: mod_base = OTHER; note = 2'-Fluoro-uridine
  modified_base 10: mod_base = um
  modified_base 11: mod_base = cm
  modified_base 12: mod_base = OTHER; note = 2'-O-methyl-adenosine
  modified_base 13: mod_base = um
  modified_base 14: mod_base = cm
  modified_base 15: mod_base = um
  misc_feature 16..18: note = linked via phosphorothioate
  modified_base 16: mod_base = cm
  modified_base 17: mod_base = um
  modified_base 18: mod_base = OTHER; note = 2'-O-methyl-adenosine
  source 1..18: mol_type = other RNA
gcgcagaattcatctcta

SEQ ID NO: 107 - RNA, 17 nt, synthetic construct
  misc_feature 1^2: note = linked via phosphorothioate
  modified_base 1: mod_base = cm
  modified_base 2: mod_base = gm
  modified_base 3: mod_base = cm
  modified_base 4: mod_base = OTHER; note = docosanamidodiethoxymethanol-adenosine
  modified_base 5: mod_base = OTHER; note = 2'-Fluoro-guanosine
  modified_base 6: mod_base = OTHER; note = 2'-Fluoro-adenosine
  modified_base 7: mod_base = OTHER; note = 2'-Fluoro-adenosine
  modified_base 8: mod_base = OTHER; note = 2'-Fluoro-uridine
  modified_base 9: mod_base = um
  modified_base 10: mod_base = cm
  modified_base 11: mod_base = OTHER; note = 2'-O-methyl-adenosine
  modified_base 12: mod_base = um
  modified_base 13: mod_base = cm
  modified_base 14: mod_base = um
  misc_feature 15..17: note = linked via phosphorothioate
  modified_base 15: mod_base = cm
  modified_base 16: mod_base = um
  modified_base 17: mod_base = OTHER; note = 2'-O-methyl-adenosine
  source 1..17: mol_type = other RNA
cgcagaattcatctcta

SEQ ID NO: 108 - RNA, 16 nt, synthetic construct
  misc_feature 1^2: note = linked via phosphorothioate
  modified_base 1: mod_base = gm
  modified_base 2: mod_base = cm
  modified_base 3: mod_base = OTHER; note = docosanamidodiethoxymethanol-adenosine
  modified_base 4: mod_base = OTHER; note = 2'-Fluoro-guanosine
  modified_base 5: mod_base = OTHER; note = 2'-Fluoro-adenosine
  modified_base 6: mod_base = OTHER; note = 2'-Fluoro-adenosine
  modified_base 7: mod_base = OTHER; note = 2'-Fluoro-uridine
  modified_base 8: mod_base = um
  modified_base 9: mod_base = cm
  modified_base 10: mod_base = OTHER; note = 2'-O-methyl-adenosine
  modified_base 11: mod_base = um
  modified_base 12: mod_base = cm
  modified_base 13: mod_base = um
  misc_feature 14..16: note = linked via phosphorothioate
  modified_base 14: mod_base = cm
  modified_base 15: mod_base = um
  modified_base 16: mod_base = OTHER; note = 2'-O-methyl-adenosine
  source 1..16: mol_type = other RNA
gcagaattcatctcta

SEQ ID NO: 109 - RNA, 15 nt, synthetic construct
  misc_feature 1^2: note = linked via phosphorothioate
  modified_base 1: mod_base = cm
  modified_base 2: mod_base = OTHER; note = docosanamidodiethoxymethanol-adenosine
  modified_base 3: mod_base = OTHER; note = 2'-Fluoro-guanosine
  modified_base 4: mod_base = OTHER; note = 2'-Fluoro-adenosine
  modified_base 5: mod_base = OTHER; note = 2'-Fluoro-adenosine
  modified_base 6: mod_base = OTHER; note = 2'-Fluoro-uridine
  modified_base 7: mod_base = um
  modified_base 8: mod_base = cm
  modified_base 9: mod_base = OTHER; note = 2'-O-methyl-adenosine
  modified_base 10: mod_base = um
  modified_base 11: mod_base = cm
  modified_base 12: mod_base = um
  misc_feature 13..15: note = linked via phosphorothioate
  modified_base 13: mod_base = cm
  modified_base 14: mod_base = um
  modified_base 15: mod_base = OTHER; note = 2'-O-methyl-adenosine
  source 1..15: mol_type = other RNA
cagaattcatctcta

SEQ ID NO: 110 - RNA, 17 nt, synthetic construct
  misc_feature 1^2: note = linked via phosphorothioate
  modified_base 1: mod_base = gm
  modified_base 2: mod_base = gm
  modified_base 3: mod_base = cm
  modified_base 4: mod_base = gm
  modified_base 5: mod_base = cm
  modified_base 6: mod_base = OTHER; note = docosanamidodiethoxymethanol-adenosine
  modified_base 7: mod_base = OTHER; note = 2'-Fluoro-guanosine
  modified_base 8: mod_base = OTHER; note = 2'-Fluoro-adenosine
  modified_base 9: mod_base = OTHER; note = 2'-Fluoro-adenosine
  modified_base 10: mod_base = OTHER; note = 2'-Fluoro-uridine
  modified_base 11: mod_base = um
  modified_base 12: mod_base = cm
  modified_base 13: mod_base = OTHER; note = 2'-O-methyl-adenosine
  modified_base 14: mod_base = um
  misc_feature 15..17: note = linked via phosphorothioate
  modified_base 15: mod_base = cm
  modified_base 16: mod_base = um
  modified_base 17: mod_base = cm
  source 1..17: mol_type = other RNA
ggcgcagaattcatctc

SEQ ID NO: 111 - RNA, 16 nt, synthetic construct
  misc_feature 1^2: note = linked via phosphorothioate
  modified_base 1: mod_base = gm
  modified_base 2: mod_base = cm
  modified_base 3: mod_base = gm
  modified_base 4: mod_base = cm
  modified_base 5: mod_base = OTHER; note = docosanamidodiethoxymethanol-adenosine
  modified_base 6: mod_base = OTHER; note = 2'-Fluoro-guanosine
  modified_base 7: mod_base = OTHER; note = 2'-Fluoro-adenosine
  modified_base 8: mod_base = OTHER; note = 2'-Fluoro-adenosine
  modified_base 9: mod_base = OTHER; note = 2'-Fluoro-uridine
  modified_base 10: mod_base = um
  modified_base 11: mod_base = cm
  modified_base 12: mod_base = OTHER; note = 2'-O-methyl-adenosine
  modified_base 13: mod_base = um
  misc_feature 14..16: note = linked via phosphorothioate
  modified_base 14: mod_base = cm
  modified_base 15: mod_base = um
  modified_base 16: mod_base = cm
  source 1..16: mol_type = other RNA
gcgcagaattcatctc

SEQ ID NO: 112 - RNA, 15 nt, synthetic construct
  misc_feature 1^2: note = linked via phosphorothioate
  modified_base 1: mod_base = cm
  modified_base 2: mod_base = gm
  modified_base 3: mod_base = cm
  modified_base 4: mod_base = OTHER; note = docosanamidodiethoxymethanol-adenosine
  modified_base 5: mod_base = OTHER; note = 2'-Fluoro-guanosine
  modified_base 6: mod_base = OTHER; note = 2'-Fluoro-adenosine
  modified_base 7: mod_base = OTHER; note = 2'-Fluoro-adenosine
  modified_base 8: mod_base = OTHER; note = 2'-Fluoro-uridine
  modified_base 9: mod_base = um
  modified_base 10: mod_base = cm
  modified_base 11: mod_base = OTHER; note = 2'-O-methyl-adenosine
  modified_base 12: mod_base = um
  misc_feature 13..15: note = linked via phosphorothioate
  modified_base 13: mod_base = cm
  modified_base 14: mod_base = um
  modified_base 15: mod_base = cm
  source 1..15: mol_type = other RNA
cgcagaattcatctc

SEQ ID NO: 113 - RNA, 14 nt, synthetic construct
  misc_feature 1^2: note = linked via phosphorothioate
  modified_base 1: mod_base = gm
  modified_base 2: mod_base = cm
  modified_base 3: mod_base = OTHER; note = docosanamidodiethoxymethanol-adenosine
  modified_base 4: mod_base = OTHER; note = 2'-Fluoro-guanosine
  modified_base 5: mod_base = OTHER; note = 2'-Fluoro-adenosine
  modified_base 6: mod_base = OTHER; note = 2'-Fluoro-adenosine
  modified_base 7: mod_base = OTHER; note = 2'-Fluoro-uridine
  modified_base 8: mod_base = um
  modified_base 9: mod_base = cm
  modified_base 10: mod_base = OTHER; note = 2'-O-methyl-adenosine
  modified_base 11: mod_base = um
  misc_feature 12..14: note = linked via phosphorothioate
  modified_base 12: mod_base = cm
  modified_base 13: mod_base = um
  modified_base 14: mod_base = cm
  source 1..14: mol_type = other RNA
gcagaattcatctc

SEQ ID NO: 114 - RNA, 13 nt, synthetic construct
  misc_feature 1^2: note = linked via phosphorothioate
  modified_base 1: mod_base = cm
  modified_base 2: mod_base = OTHER; note = docosanamidodiethoxymethanol-adenosine
  modified_base 3: mod_base = OTHER; note = 2'-Fluoro-guanosine
  modified_base 4: mod_base = OTHER; note = 2'-Fluoro-adenosine
  modified_base 5: mod_base = OTHER; note = 2'-Fluoro-adenosine
  modified_base 6: mod_base = OTHER; note = 2'-Fluoro-uridine
  modified_base 7: mod_base = um
  modified_base 8: mod_base = cm
  modified_base 9: mod_base = OTHER; note = 2'-O-methyl-adenosine
  modified_base 10: mod_base = um
  misc_feature 11..13: note = linked via phosphorothioate
  modified_base 11: mod_base = cm
  modified_base 12: mod_base = um
  modified_base 13: mod_base = cm
  source 1..13: mol_type = other RNA
cagaattcatctc

SEQ ID NO: 115 - RNA, 17 nt, synthetic construct
  misc_feature 1^2: note = linked via phosphorothioate
  modified_base 1: mod_base = OTHER; note = 2'-O,4'-C-Methyleneguanosine
  modified_base 2: mod_base = gm
  modified_base 3: mod_base = cm
  modified_base 4: mod_base = gm
  modified_base 5: mod_base = cm
  modified_base 6: mod_base = OTHER; note = docosanamidodiethoxymethanol-adenosine
  modified_base 7: mod_base = OTHER; note = 2'-Fluoro-guanosine
  modified_base 8: mod_base = OTHER; note = 2'-Fluoro-adenosine
  modified_base 9: mod_base = OTHER; note = 2'-Fluoro-adenosine
  modified_base 10: mod_base = OTHER; note = 2'-Fluoro-uridine
  modified_base 11: mod_base = um
  modified_base 12: mod_base = cm
  modified_base 13: mod_base = OTHER; note = 2'-O-methyl-adenosine
  modified_base 14: mod_base = um
  misc_feature 15..17: note = linked via phosphorothioate
  modified_base 15: mod_base = cm
  modified_base 16: mod_base = um
  modified_base 17: mod_base = cm
  source 1..17: mol_type = other RNA
ggcgcagaattcatctc

SEQ ID NO: 116 - RNA, 16 nt, synthetic construct
  misc_feature 1^2: note = linked via phosphorothioate
  modified_base 1: mod_base = OTHER; note = 2'-O,4'-C-Methyleneguanosine
  modified_base 2: mod_base = cm
  modified_base 3: mod_base = gm
  modified_base 4: mod_base = cm
  modified_base 5: mod_base = OTHER; note = docosanamidodiethoxymethanol-adenosine
  modified_base 6: mod_base = OTHER; note = 2'-Fluoro-guanosine
  modified_base 7: mod_base = OTHER; note = 2'-Fluoro-adenosine
  modified_base 8: mod_base = OTHER; note = 2'-Fluoro-adenosine
  modified_base 9: mod_base = OTHER; note = 2'-Fluoro-uridine
  modified_base 10: mod_base = um
  modified_base 11: mod_base = cm
  modified_base 12: mod_base = OTHER; note = 2'-O-methyl-adenosine
  modified_base 13: mod_base = um
  misc_feature 14..16: note = linked via phosphorothioate
  modified_base 14: mod_base = cm
  modified_base 15: mod_base = um
  modified_base 16: mod_base = cm
  source 1..16: mol_type = other RNA
gcgcagaattcatctc

SEQ ID NO: 117 - RNA, 15 nt, synthetic construct
  misc_feature 1^2: note = linked via phosphorothioate
  modified_base 1: mod_base = OTHER; note = 2'-O,4'-C-Methylenecytidine
  modified_base 2: mod_base = gm
  modified_base 3: mod_base = cm
  modified_base 4: mod_base = OTHER; note = docosanamidodiethoxymethanol-adenosine
  modified_base 5: mod_base = OTHER; note = 2'-Fluoro-guanosine
  modified_base 6: mod_base = OTHER; note = 2'-Fluoro-adenosine
  modified_base 7: mod_base = OTHER; note = 2'-Fluoro-adenosine
  modified_base 8: mod_base = OTHER; note = 2'-Fluoro-uridine
  modified_base 9: mod_base = um
  modified_base 10: mod_base = cm
  modified_base 11: mod_base = OTHER; note = 2'-O-methyl-adenosine
  modified_base 12: mod_base = um
  misc_feature 13..15: note = linked via phosphorothioate
  modified_base 13: mod_base = cm
  modified_base 14: mod_base = um
  modified_base 15: mod_base = cm
  source 1..15: mol_type = other RNA
cgcagaattcatctc

SEQ ID NO: 118 - RNA, 14 nt, synthetic construct
  misc_feature 1^2: note = linked via phosphorothioate
  modified_base 1: mod_base = OTHER; note = 2'-O,4'-C-Methyleneguanosine
  modified_base 2: mod_base = cm
  modified_base 3: mod_base = OTHER; note = docosanamidodiethoxymethanol-adenosine
  modified_base 4: mod_base = OTHER; note = 2'-Fluoro-guanosine
  modified_base 5: mod_base = OTHER; note = 2'-Fluoro-adenosine
  modified_base 6: mod_base = OTHER; note = 2'-Fluoro-adenosine
  modified_base 7: mod_base = OTHER; note = 2'-Fluoro-uridine
  modified_base 8: mod_base = um
  modified_base 9: mod_base = cm
  modified_base 10: mod_base = OTHER; note = 2'-O-methyl-adenosine
  modified_base 11: mod_base = um
  misc_feature 12..14: note = linked via phosphorothioate
  modified_base 12: mod_base = cm
  modified_base 13: mod_base = um
  modified_base 14: mod_base = cm
  source 1..14: mol_type = other RNA
gcagaattcatctc

SEQ ID NO: 119 - RNA, 13 nt, synthetic construct
  misc_feature 1^2: note = linked via phosphorothioate
  modified_base 1: mod_base = OTHER; note = 2'-O,4'-C-Methylenecytidine
  modified_base 2: mod_base = OTHER; note = docosanamidodiethoxymethanol-adenosine
  modified_base 3: mod_base = OTHER; note = 2'-Fluoro-guanosine
  modified_base 4: mod_base = OTHER; note = 2'-Fluoro-adenosine
  modified_base 5: mod_base = OTHER; note = 2'-Fluoro-adenosine
  modified_base 6: mod_base = OTHER; note = 2'-Fluoro-uridine
  modified_base 7: mod_base = um
  modified_base 8: mod_base = cm
  modified_base 9: mod_base = OTHER; note = 2'-O-methyl-adenosine
  modified_base 10: mod_base = um
  misc_feature 11..13: note = linked via phosphorothioate
  modified_base 11: mod_base = cm
  modified_base 12: mod_base = um
  modified_base 13: mod_base = cm
  source 1..13: mol_type = other RNA
cagaattcatctc

SEQ ID NO: 120 - RNA, 17 nt, synthetic construct
  misc_feature 1^2: note = linked via phosphorothioate
  modified_base 1: mod_base = OTHER; note = 2'-O,4'-C-Methyleneguanosine
  modified_base 2: mod_base = gm
  modified_base 3: mod_base = cm
  modified_base 4: mod_base = gm
  modified_base 5: mod_base = cm
  modified_base 6: mod_base = OTHER; note = docosanamidodiethoxymethanol-adenosine
  modified_base 7: mod_base = OTHER; note = 2'-Fluoro-guanosine
  modified_base 8: mod_base = OTHER; note = 2'-Fluoro-adenosine
  modified_base 9: mod_base = OTHER; note = 2'-Fluoro-adenosine
  modified_base 10: mod_base = OTHER; note = 2'-Fluoro-uridine
  modified_base 11: mod_base = um
  modified_base 12: mod_base = cm
  modified_base 13: mod_base = OTHER; note = 2'-O-methyl-adenosine
  modified_base 14: mod_base = um
  misc_feature 15..17: note = linked via phosphorothioate
  modified_base 15: mod_base = OTHER; note = 2'-O,4'-C-Methylenecytidine
  modified_base 16: mod_base = um
  modified_base 17: mod_base = cm
  source 1..17: mol_type = other RNA
ggcgcagaattcatctc

SEQ ID NO: 121 - RNA, 16 nt, synthetic construct
  misc_feature 1^2: note = linked via phosphorothioate
  modified_base 1: mod_base = OTHER; note = 2'-O,4'-C-Methyleneguanosine
  modified_base 2: mod_base = cm
  modified_base 3: mod_base = gm
  modified_base 4: mod_base = cm
  modified_base 5: mod_base = OTHER; note = docosanamidodiethoxymethanol-adenosine
  modified_base 6: mod_base = OTHER; note = 2'-Fluoro-guanosine
  modified_base 7: mod_base = OTHER; note = 2'-Fluoro-adenosine
  modified_base 8: mod_base = OTHER; note = 2'-Fluoro-adenosine
  modified_base 9: mod_base = OTHER; note = 2'-Fluoro-uridine
  modified_base 10: mod_base = um
  modified_base 11: mod_base = cm
  modified_base 12: mod_base = OTHER; note = 2'-O-methyl-adenosine
  modified_base 13: mod_base = um
  misc_feature 14..16: note = linked via phosphorothioate
  modified_base 14: mod_base = OTHER; note = 2'-O,4'-C-Methylenecytidine
  modified_base 15: mod_base = um
  modified_base 16: mod_base = cm
  source 1..16: mol_type = other RNA
gcgcagaattcatctc

SEQ ID NO: 122 - RNA, 15 nt, synthetic construct
  misc_feature 1^2: note = linked via phosphorothioate
  modified_base 1: mod_base = OTHER; note = 2'-O,4'-C-Methylenecytidine
  modified_base 2: mod_base = gm
  modified_base 3: mod_base = cm
  modified_base 4: mod_base = OTHER; note = docosanamidodiethoxymethanol-adenosine
  modified_base 5: mod_base = OTHER; note = 2'-Fluoro-guanosine
  modified_base 6: mod_base = OTHER; note = 2'-Fluoro-adenosine
  modified_base 7: mod_base = OTHER; note = 2'-Fluoro-adenosine
  modified_base 8: mod_base = OTHER; note = 2'-Fluoro-uridine
  modified_base 9: mod_base = um
  modified_base 10: mod_base = cm
  modified_base 11: mod_base = OTHER; note = 2'-O-methyl-adenosine
  modified_base 12: mod_base = um
  misc_feature 13..15: note = linked via phosphorothioate
  modified_base 13: mod_base = OTHER; note = 2'-O,4'-C-Methylenecytidine
  modified_base 14: mod_base = um
  modified_base 15: mod_base = cm
  source 1..15: mol_type = other RNA
cgcagaattcatctc

SEQ ID NO: 123 - RNA, 14 nt, synthetic construct
  misc_feature 1^2: note = linked via phosphorothioate
  modified_base 1: mod_base = OTHER; note = 2'-O,4'-C-Methyleneguanosine
  modified_base 2: mod_base = cm
  modified_base 3: mod_base = OTHER; note = docosanamidodiethoxymethanol-adenosine
  modified_base 4: mod_base = OTHER; note = 2'-Fluoro-guanosine
  modified_base 5: mod_base = OTHER; note = 2'-Fluoro-adenosine
  modified_base 6: mod_base = OTHER; note = 2'-Fluoro-adenosine
  modified_base 7: mod_base = OTHER; note = 2'-Fluoro-uridine
  modified_base 8: mod_base = um
  modified_base 9: mod_base = cm
  modified_base 10: mod_base = OTHER; note = 2'-O-methyl-adenosine
  modified_base 11: mod_base = um
  misc_feature 12..14: note = linked via phosphorothioate
  modified_base 12: mod_base = OTHER; note = 2'-O,4'-C-Methylenecytidine
  modified_base 13: mod_base = um
  modified_base 14: mod_base = cm
  source 1..14: mol_type = other RNA
gcagaattcatctc

SEQ ID NO: 124 - RNA, 13 nt, synthetic construct
  misc_feature 1^2: note = linked via phosphorothioate
  modified_base 1: mod_base = OTHER; note = 2'-O,4'-C-Methylenecytidine
  modified_base 2: mod_base = OTHER; note = docosanamidodiethoxymethanol-adenosine
  modified_base 3: mod_base = OTHER; note = 2'-Fluoro-guanosine
  modified_base 4: mod_base = OTHER; note = 2'-Fluoro-adenosine
  modified_base 5: mod_base = OTHER; note = 2'-Fluoro-adenosine
  modified_base 6: mod_base = OTHER; note = 2'-Fluoro-uridine
  modified_base 7: mod_base = um
  modified_base 8: mod_base = cm
  modified_base 9: mod_base = OTHER; note = 2'-O-methyl-adenosine
  modified_base 10: mod_base = um
  misc_feature 11..13: note = linked via phosphorothioate
  modified_base 11: mod_base = OTHER; note = 2'-O,4'-C-Methylenecytidine
  modified_base 12: mod_base = um
  modified_base 13: mod_base = cm
  source 1..13: mol_type = other RNA
cagaattcatctc

SEQ ID NO: 125 - DNA, 17 bp, synthetic construct
  misc_feature 1..13: note = RNA fragment
  misc_feature 14: note = DNA fragment
  misc_feature 15..17: note = RNA fragment
  misc_feature 1^2: note = linked via phosphorothioate
  modified_base 1: mod_base = OTHER; note = 2'-O,4'-C-Methyleneguanosine
  modified_base 2: mod_base = gm
  modified_base 3: mod_base = cm
  modified_base 4: mod_base = gm
  modified_base 5: mod_base = cm
  modified_base 6: mod_base = OTHER; note = docosanamidodiethoxymethanol-adenosine
  modified_base 7: mod_base = OTHER; note = 2'-Fluoro-guanosine
  modified_base 8: mod_base = OTHER; note = 2'-Fluoro-adenosine
  modified_base 9: mod_base = OTHER; note = 2'-Fluoro-adenosine
  modified_base 10: mod_base = OTHER; note = 2'-Fluoro-uridine
  modified_base 11: mod_base = um
  modified_base 12: mod_base = cm
  modified_base 13: mod_base = OTHER; note = 2'-O-methyl-adenosine
  modified_base 14: mod_base = OTHER; note = 2'-O,4'-C-Methylenethymine
  misc_feature 15..17: note = linked via phosphorothioate
  modified_base 15: mod_base = OTHER; note = 2'-O,4'-C-Methylenecytidine
  modified_base 16: mod_base = um
  modified_base 17: mod_base = cm
  source 1..17: mol_type = other DNA
ggcgcagaattcatctc

SEQ ID NO: 126 - DNA, 16 bp, synthetic construct
  misc_feature 1..12: note = RNA fragment
  misc_feature 13: note = DNA fragment
  misc_feature 14..16: note = RNA fragment
  misc_feature 1^2: note = linked via phosphorothioate
  modified_base 1: mod_base = OTHER; note = 2'-O,4'-C-Methyleneguanosine
  modified_base 2: mod_base = cm
  modified_base 3: mod_base = gm
  modified_base 4: mod_base = cm
  modified_base 5: mod_base = OTHER; note = docosanamidodiethoxymethanol-adenosine
  modified_base 6: mod_base = OTHER; note = 2'-Fluoro-guanosine
  modified_base 7: mod_base = OTHER; note = 2'-Fluoro-adenosine
  modified_base 8: mod_base = OTHER; note = 2'-Fluoro-adenosine
  modified_base 9: mod_base = OTHER; note = 2'-Fluoro-uridine
  modified_base 10: mod_base = um
  modified_base 11: mod_base = cm
  modified_base 12: mod_base = OTHER; note = 2'-O-methyl-adenosine
  modified_base 13: mod_base = OTHER; note = 2'-O,4'-C-Methylenethymine
  misc_feature 14..16: note = linked via phosphorothioate
  modified_base 14: mod_base = OTHER; note = 2'-O,4'-C-Methylenecytidine
  modified_base 15: mod_base = um
  modified_base 16: mod_base = cm
  source 1..16: mol_type = other DNA
gcgcagaattcatctc

SEQ ID NO: 127 - DNA, 15 bp, synthetic construct
  misc_feature 1..11: note = RNA fragment
  misc_feature 12: note = DNA fragment
  misc_feature 13..15: note = RNA fragment
  misc_feature 1^2: note = linked via phosphorothioate
  modified_base 1: mod_base = OTHER; note = 2'-O,4'-C-Methylenecytidine
  modified_base 2: mod_base = gm
  modified_base 3: mod_base = cm
  modified_base 4: mod_base = OTHER; note = docosanamidodiethoxymethanol-adenosine
  modified_base 5: mod_base = OTHER; note = 2'-Fluoro-guanosine
  modified_base 6: mod_base = OTHER; note = 2'-Fluoro-adenosine
  modified_base 7: mod_base = OTHER; note = 2'-Fluoro-adenosine
  modified_base 8: mod_base = OTHER; note = 2'-Fluoro-uridine
  modified_base 9: mod_base = um
  modified_base 10: mod_base = cm
  modified_base 11: mod_base = OTHER; note = 2'-O-methyl-adenosine
  modified_base 12: mod_base = OTHER; note = 2'-O,4'-C-Methylenethymine
  misc_feature 13..15: note = linked via phosphorothioate
  modified_base 13: mod_base = OTHER; note = 2'-O,4'-C-Methylenecytidine
  modified_base 14: mod_base = um
  modified_base 15: mod_base = cm
  source 1..15: mol_type = other DNA
cgcagaattcatctc

SEQ ID NO: 128 - DNA, 14 bp, synthetic construct
  misc_feature 1..10: note = RNA fragment
  misc_feature 11: note = DNA fragment
  misc_feature 12..14: note = RNA fragment
  misc_feature 1^2: note = linked via phosphorothioate
  modified_base 1: mod_base = OTHER; note = 2'-O,4'-C-Methyleneguanosine
  modified_base 2: mod_base = cm
  modified_base 3: mod_base = OTHER; note = docosanamidodiethoxymethanol-adenosine
  modified_base 4: mod_base = OTHER; note = 2'-Fluoro-guanosine
  modified_base 5: mod_base = OTHER; note = 2'-Fluoro-adenosine
  modified_base 6: mod_base = OTHER; note = 2'-Fluoro-adenosine
  modified_base 7: mod_base = OTHER; note = 2'-Fluoro-uridine
  modified_base 8: mod_base = um
  modified_base 9: mod_base = cm
  modified_base 10: mod_base = OTHER; note = 2'-O-methyl-adenosine
  modified_base 11: mod_base = OTHER; note = 2'-O,4'-C-Methylenethymine
  misc_feature 12..14: note = linked via phosphorothioate
  modified_base 12: mod_base = OTHER; note = 2'-O,4'-C-Methylenecytidine
  modified_base 13: mod_base = um
  modified_base 14: mod_base = cm
  source 1..14: mol_type = other DNA
gcagaattcatctc

SEQ ID NO: 129 - DNA, 13 bp, synthetic construct
  misc_feature 1..9: note = RNA fragment
  misc_feature 10: note = DNA fragment
  misc_feature 11..13: note = RNA fragment
  misc_feature 1^2: note = linked via phosphorothioate
  modified_base 1: mod_base = OTHER; note = 2'-O,4'-C-Methylenecytidine
  modified_base 2: mod_base = OTHER; note = docosanamidodiethoxymethanol-adenosine
  modified_base 3: mod_base = OTHER; note = 2'-Fluoro-guanosine
  modified_base 4: mod_base = OTHER; note = 2'-Fluoro-adenosine
  modified_base 5: mod_base = OTHER; note = 2'-Fluoro-adenosine
  modified_base 6: mod_base = OTHER; note = 2'-Fluoro-uridine
  modified_base 7: mod_base = um
  modified_base 8: mod_base = cm
  modified_base 9: mod_base = OTHER; note = 2'-O-methyl-adenosine
  modified_base 10: mod_base = OTHER; note = 2'-O,4'-C-Methylenethymine
  misc_feature 11..13: note = linked via phosphorothioate
  modified_base 11: mod_base = OTHER; note = 2'-O,4'-C-Methylenecytidine
  modified_base 12: mod_base = um
  modified_base 13: mod_base = cm
  source 1..13: mol_type = other DNA
cagaattcatctc

SEQ ID NO: 130 - DNA, 16 bp, synthetic construct
  misc_feature 1..13: note = RNA fragment
  misc_feature 14: note = DNA fragment
  misc_feature 15..16: note = RNA fragment
  misc_feature 1^2: note = linked via phosphorothioate
  modified_base 1: mod_base = OTHER; note = 2'-O,4'-C-Methyleneguanosine
  modified_base 2: mod_base = gm
  modified_base 3: mod_base = cm
  modified_base 4: mod_base = gm
  modified_base 5: mod_base = cm
  modified_base 6: mod_base = OTHER; note = docosanamidodiethoxymethanol-adenosine
  modified_base 7: mod_base = OTHER; note = 2'-Fluoro-guanosine
  modified_base 8: mod_base = OTHER; note = 2'-Fluoro-adenosine
  modified_base 9: mod_base = OTHER; note = 2'-Fluoro-adenosine
  modified_base 10: mod_base = OTHER; note = 2'-Fluoro-uridine
  modified_base 11: mod_base = um
  modified_base 12: mod_base = cm
  modified_base 13: mod_base = OTHER; note = 2'-O-methyl-adenosine
  misc_feature 14..16: note = linked via phosphorothioate
  modified_base 14: mod_base = OTHER; note = 2'-O,4'-C-Methylenethymine
  modified_base 15: mod_base = OTHER; note = 2'-O,4'-C-Methylenecytidine
  modified_base 16: mod_base = um
  source 1..16: mol_type = other DNA
ggcgcagaattcatct

SEQ ID NO: 131 - DNA, 15 bp, synthetic construct
  misc_feature 1..12: note = RNA fragment
  misc_feature 13: note = DNA fragment
  misc_feature 14..15: note = RNA fragment
  misc_feature 1^2: note = linked via phosphorothioate
  modified_base 1: mod_base = OTHER; note = 2'-O,4'-C-Methyleneguanosine
  modified_base 2: mod_base = cm
  modified_base 3: mod_base = gm
  modified_base 4: mod_base = cm
  modified_base 5: mod_base = OTHER; note = docosanamidodiethoxymethanol-adenosine
  modified_base 6: mod_base = OTHER; note = 2'-Fluoro-guanosine
  modified_base 7: mod_base = OTHER; note = 2'-Fluoro-adenosine
  modified_base 8: mod_base = OTHER; note = 2'-Fluoro-adenosine
  modified_base 9: mod_base = OTHER; note = 2'-Fluoro-uridine
  modified_base 10: mod_base = um
  modified_base 11: mod_base = cm
  modified_base 12: mod_base = OTHER; note = 2'-O-methyl-adenosine
  misc_feature 13..15: note = linked via phosphorothioate
  modified_base 13: mod_base = OTHER; note = 2'-O,4'-C-Methylenethymine
  modified_base 14: mod_base = OTHER; note = 2'-O,4'-C-Methylenecytidine
  modified_base 15: mod_base = um
  source 1..15: mol_type = other DNA
gcgcagaattcatct

SEQ ID NO: 132 - DNA, 14 bp, synthetic construct
  misc_feature 1..11: note = RNA fragment
  misc_feature 12: note = DNA fragment
  misc_feature 13..14: note = RNA fragment
  misc_feature 1^2: note = linked via phosphorothioate
  modified_base 1: mod_base = OTHER; note = 2'-O,4'-C-Methylenecytidine
  modified_base 2: mod_base = gm
  modified_base 3: mod_base = cm
  modified_base 4: mod_base = OTHER; note = docosanamidodiethoxymethanol-adenosine
  modified_base 5: mod_base = OTHER; note = 2'-Fluoro-guanosine
  modified_base 6: mod_base = OTHER; note = 2'-Fluoro-adenosine
  modified_base 7: mod_base = OTHER; note = 2'-Fluoro-adenosine
  modified_base 8: mod_base = OTHER; note = 2'-Fluoro-uridine
  modified_base 9: mod_base = um
  modified_base 10: mod_base = cm
  modified_base 11: mod_base = OTHER; note = 2'-O-methyl-adenosine
  misc_feature 12..14: note = linked via phosphorothioate
  modified_base 12: mod_base = OTHER; note = 2'-O,4'-C-Methylenethymine
  modified_base 13: mod_base = OTHER; note = 2'-O,4'-C-Methylenecytidine
  modified_base 14: mod_base = um
  source 1..14: mol_type = other DNA
cgcagaattcatct

SEQ ID NO: 133 - DNA, 13 bp, synthetic construct
  misc_feature 1..10: note = RNA fragment
  misc_feature 11: note = DNA fragment
  misc_feature 12..13: note = RNA fragment
  misc_feature 1^2: note = linked via phosphorothioate
  modified_base 1: mod_base = OTHER; note = 2'-O,4'-C-Methyleneguanosine
  modified_base 2: mod_base = cm
  modified_base 3: mod_base = OTHER; note = docosanamidodiethoxymethanol-adenosine
  modified_base 4: mod_base = OTHER; note = 2'-Fluoro-guanosine
  modified_base 5: mod_base = OTHER; note = 2'-Fluoro-adenosine
  modified_base 6: mod_base = OTHER; note = 2'-Fluoro-adenosine
  modified_base 7: mod_base = OTHER; note = 2'-Fluoro-uridine
  modified_base 8: mod_base = um
  modified_base 9: mod_base = cm
  modified_base 10: mod_base = OTHER; note = 2'-O-methyl-adenosine
  misc_feature 11..13: note = linked via phosphorothioate
  modified_base 11: mod_base = OTHER; note = 2'-O,4'-C-Methylenethymine
  modified_base 12: mod_base = OTHER; note = 2'-O,4'-C-Methylenecytidine
  modified_base 13: mod_base = um
  source 1..13: mol_type = other DNA
gcagaattcatct

SEQ ID NO: 134 - DNA, 12 bp, synthetic construct
  misc_feature 1..9: note = RNA fragment
  misc_feature 10: note = DNA fragment
  misc_feature 11..12: note = RNA fragment
  misc_feature 1^2: note = linked via phosphorothioate
  modified_base 1: mod_base = OTHER; note = 2'-O,4'-C-Methylenecytidine
  modified_base 2: mod_base = OTHER; note = docosanamidodiethoxymethanol-adenosine
  modified_base 3: mod_base = OTHER; note = 2'-Fluoro-guanosine
  modified_base 4: mod_base = OTHER; note = 2'-Fluoro-adenosine
  modified_base 5: mod_base = OTHER; note = 2'-Fluoro-adenosine
  modified_base 6: mod_base = OTHER; note = 2'-Fluoro-uridine
  modified_base 7: mod_base = um
  modified_base 8: mod_base = cm
  modified_base 9: mod_base = OTHER; note = 2'-O-methyl-adenosine
  misc_feature 10..12: note = linked via phosphorothioate
  modified_base 10: mod_base = OTHER; note = 2'-O,4'-C-Methylenethymine
  modified_base 11: mod_base = OTHER; note = 2'-O,4'-C-Methylenecytidine
  modified_base 12: mod_base = um
  source 1..12: mol_type = other DNA
cagaattcatct

SEQ ID NO: 135 - DNA, 15 bp, synthetic construct
  misc_feature 1..13: note = RNA fragment
  misc_feature 14: note = DNA fragment
  misc_feature 15: note = RNA fragment
  misc_feature 1^2: note = linked via phosphorothioate
  modified_base 1: mod_base = OTHER; note = 2'-O,4'-C-Methyleneguanosine
  modified_base 2: mod_base = gm
  modified_base 3: mod_base = cm
  modified_base 4: mod_base = gm
  modified_base 5: mod_base = cm
  modified_base 6: mod_base = OTHER; note = docosanamidodiethoxymethanol-adenosine
  modified_base 7: mod_base = OTHER; note = 2'-Fluoro-guanosine
  modified_base 8: mod_base = OTHER; note = 2'-Fluoro-adenosine
  modified_base 9: mod_base = OTHER; note = 2'-Fluoro-adenosine
  modified_base 10: mod_base = OTHER; note = 2'-Fluoro-uridine
  modified_base 11: mod_base = um
  modified_base 12: mod_base = cm
  misc_feature 13..15: note = linked via phosphorothioate
  modified_base 13: mod_base = OTHER; note = 2'-O-methyl-adenosine
  modified_base 14: mod_base = OTHER; note = 2'-O,4'-C-Methylenethymine
  modified_base 15: mod_base = OTHER; note = 2'-O,4'-C-Methylenecytidine
  source 1..15: mol_type = other DNA
ggcgcagaattcatc

SEQ ID NO: 136 - DNA, 14 bp, synthetic construct
  misc_feature 1..12: note = RNA fragment
  misc_feature 13: note = DNA fragment
  misc_feature 14: note = RNA fragment
  misc_feature 1^2: note = linked via phosphorothioate
  modified_base 1: mod_base = OTHER; note = 2'-O,4'-C-Methyleneguanosine
  modified_base 2: mod_base = cm
  modified_base 3: mod_base = gm
  modified_base 4: mod_base = cm
  modified_base 5: mod_base = OTHER; note = docosanamidodiethoxymethanol-adenosine
  modified_base 6: mod_base = OTHER; note = 2'-Fluoro-guanosine
  modified_base 7: mod_base = OTHER; note = 2'-Fluoro-adenosine
  modified_base 8: mod_base = OTHER; note = 2'-Fluoro-adenosine
  modified_base 9: mod_base = OTHER; note = 2'-Fluoro-uridine
  modified_base 10: mod_base = um
  modified_base 11: mod_base = cm
  misc_feature 12..14: note = linked via phosphorothioate
  modified_base 12: mod_base = OTHER; note = 2'-O-methyl-adenosine
  modified_base 13: mod_base = OTHER; note = 2'-O,4'-C-Methylenethymine
  modified_base 14: mod_base = OTHER; note = 2'-O,4'-C-Methylenecytidine
  source 1..14: mol_type = other DNA
gcgcagaattcatc

SEQ ID NO: 137 - DNA, 13 bp, synthetic construct
  misc_feature 1..11: note = RNA fragment
  misc_feature 12: note = DNA fragment
  misc_feature 13: note = RNA fragment
  misc_feature 1^2: note = linked via phosphorothioate
  modified_base 1: mod_base = OTHER; note = 2'-O,4'-C-Methylenecytidine
  modified_base 2: mod_base = gm
  modified_base 3: mod_base = cm
  modified_base 4: mod_base = OTHER; note = docosanamidodiethoxymethanol-adenosine
  modified_base 5: mod_base = OTHER; note = 2'-Fluoro-guanosine
  modified_base 6: mod_base = OTHER; note = 2'-Fluoro-adenosine
  modified_base 7: mod_base = OTHER; note = 2'-Fluoro-adenosine
  modified_base 8: mod_base = OTHER; note = 2'-Fluoro-uridine
  modified_base 9: mod_base = um
  modified_base 10: mod_base = cm
  misc_feature 11..13: note = linked via phosphorothioate
  modified_base 11: mod_base = OTHER; note = 2'-O-methyl-adenosine
  modified_base 12: mod_base = OTHER; note = 2'-O,4'-C-Methylenethymine
  modified_base 13: mod_base = OTHER; note = 2'-O,4'-C-Methylenecytidine
  source 1..13: mol_type = other DNA
cgcagaattcatc

SEQ ID NO: 138 - DNA, 12 bp, synthetic construct
  misc_feature 1..10: note = RNA fragment
  misc_feature 11: note = DNA fragment
  misc_feature 12: note = RNA fragment
  misc_feature 1^2: note = linked via phosphorothioate
  modified_base 1: mod_base = OTHER; note = 2'-O,4'-C-Methyleneguanosine
  modified_base 2: mod_base = cm
  modified_base 3: mod_base = OTHER; note = docosanamidodiethoxymethanol-adenosine
  modified_base 4: mod_base = OTHER; note = 2'-Fluoro-guanosine
  modified_base 5: mod_base = OTHER; note = 2'-Fluoro-adenosine
  modified_base 6: mod_base = OTHER; note = 2'-Fluoro-adenosine
  modified_base 7: mod_base = OTHER; note = 2'-Fluoro-uridine
  modified_base 8: mod_base = um
  modified_base 9: mod_base = cm
  misc_feature 10..12: note = linked via phosphorothioate
  modified_base 10: mod_base = OTHER; note = 2'-O-methyl-adenosine
  modified_base 11: mod_base = OTHER; note = 2'-O,4'-C-Methylenethymine
  modified_base 12: mod_base = OTHER; note = 2'-O,4'-C-Methylenecytidine
  source 1..12: mol_type = other DNA
gcagaattcatc

SEQ ID NO: 139 - DNA, 11 bp, synthetic construct
  misc_feature 1..9: note = RNA fragment
  misc_feature 10: note = DNA fragment
  misc_feature 11: note = RNA fragment
  misc_feature 1^2: note = linked via phosphorothioate
  modified_base 1: mod_base = OTHER; note = 2'-O,4'-C-Methylenecytidine
  modified_base 2: mod_base = OTHER; note = docosanamidodiethoxymethanol-adenosine
  modified_base 3: mod_base = OTHER; note = 2'-Fluoro-guanosine
  modified_base 4: mod_base = OTHER; note = 2'-Fluoro-adenosine
  modified_base 5: mod_base = OTHER; note = 2'-Fluoro-adenosine
  modified_base 6: mod_base = OTHER; note = 2'-Fluoro-uridine
  modified_base 7: mod_base = um
  modified_base 8: mod_base = cm
  misc_feature 9..11: note = linked via phosphorothioate
  modified_base 9: mod_base = OTHER; note = 2'-O-methyl-adenosine
  modified_base 10: mod_base = OTHER; note = 2'-O,4'-C-Methylenethymine
  modified_base 11: mod_base = OTHER; note = 2'-O,4'-C-Methylenecytidine
  source 1..11: mol_type = other DNA
cagaattcatc

SEQ ID NO: 140 - DNA, 10 bp, synthetic construct
  misc_feature 1..8: note = RNA fragment
  misc_feature 9: note = DNA fragment
  misc_feature 10: note = RNA fragment
  misc_feature 1^2: note = linked via phosphorothioate
  modified_base 1: mod_base = OTHER; note = 2'-O,4'-C-Methyleneadenosine
  modified_base 2: mod_base = OTHER; note = 2'-Fluoro-guanosine
  modified_base 3: mod_base = OTHER; note = 2'-Fluoro-adenosine
  modified_base 4: mod_base = OTHER; note = docosanamidodiethoxymethanol-adenosine
  modified_base 5: mod_base = OTHER; note = 2'-Fluoro-uridine
  modified_base 6: mod_base = um
  modified_base 7: mod_base = cm
  misc_feature 8..10: note = linked via phosphorothioate
  modified_base 8: mod_base = OTHER; note = 2'-O-methyl-adenosine
  modified_base 9: mod_base = OTHER; note = 2'-O,4'-C-Methylenethymine
  modified_base 10: mod_base = OTHER; note = 2'-O,4'-C-Methylenecytidine
  source 1..10: mol_type = other DNA
agaattcatc

SEQ ID NO: 141-142 - skipped (2 entries)

SEQ ID NO: 143 - RNA, 20 nt, synthetic construct
  misc_feature 1^2: note = linked via phosphorothioate
  modified_base 1: mod_base = OTHER; note = 2'-O-methyl-adenosine
  modified_base 2: mod_base = gm
  modified_base 3: mod_base = gm
  modified_base 4: mod_base = cm
  modified_base 5: mod_base = gm
  modified_base 6: mod_base = cm
  modified_base 7: mod_base = OTHER; note = 2'-O-methyl-adenosine
  modified_base 8: mod_base = OTHER; note = 2'-Fluoro-guanosine
  modified_base 9: mod_base = OTHER; note = 2'-Fluoro-adenosine
  modified_base 10: mod_base = OTHER; note = 2'-Fluoro-adenosine
  modified_base 11: mod_base = OTHER; note = 2'-Fluoro-uridine
  modified_base 12: mod_base = um
  modified_base 13: mod_base = cm
  modified_base 14: mod_base = OTHER; note = 2'-O-methyl-adenosine
  modified_base 15: mod_base = um
  modified_base 16: mod_base = cm
  modified_base 17: mod_base = um
  misc_feature 18..20: note = linked via phosphorothioate
  modified_base 18: mod_base = cm
  modified_base 19: mod_base = um
  modified_base 20: mod_base = OTHER; note = 2'-O-methyl-adenosine
  source 1..20: mol_type = other RNA
aggcgcagaattcatctcta

SEQ ID NO: 144 - RNA, 31 nt, synthetic construct; identical to SEQ ID NO: 54
  misc_feature 1^2: note = linked via phosphorothioate
  modified_base 1: mod_base = cm
  modified_base 2: mod_base = OTHER; note = 2'-O-methyl-adenosine
  modified_base 3: mod_base = OTHER; note = 2'-Fluoro-guanosine
  modified_base 4: mod_base = OTHER; note = 2'-Fluoro-adenosine
  modified_base 5: mod_base = OTHER; note = 2'-Fluoro-adenosine
  modified_base 6: mod_base = OTHER; note = 2'-Fluoro-uridine
  modified_base 7: mod_base = um
  modified_base 8: mod_base = cm
  modified_base 9: mod_base = OTHER; note = 2'-O-methyl-adenosine
  modified_base 10: mod_base = um
  modified_base 11: mod_base = cm
  modified_base 12: mod_base = um
  modified_base 13: mod_base = cm
  modified_base 14: mod_base = um
  modified_base 15: mod_base = OTHER; note = 2'-O-methyl-adenosine
  modified_base 16: mod_base = gm
  modified_base 17: mod_base = cm
  modified_base 18: mod_base = OTHER; note = 2'-O-methyl-adenosine
  modified_base 19: mod_base = gm
  modified_base 20: mod_base = cm
  modified_base 21: mod_base = cm
  modified_base 22: mod_base = gm
  modified_base 23: mod_base = OTHER; note = docosanamidodiethoxymethanol-adenosine
  modified_base 24: mod_base = OTHER; note = 2'-O-methyl-adenosine
  modified_base 25: mod_base = OTHER; note = 2'-O-methyl-adenosine
  modified_base 26: mod_base = gm
  modified_base 27: mod_base = gm
  modified_base 28: mod_base = cm
  modified_base 29: mod_base = um
  modified_base 30: mod_base = gm
  modified_base 31: mod_base = cm
  source 1..31: mol_type = other RNA

SEQ ID NO: 145 - RNA, 31 nt, synthetic construct; identical to SEQ ID NO: 54
  misc_feature 1^2: note = linked via phosphorothioate
  modified_base 1: mod_base = cm
  modified_base 2: mod_base = OTHER; note = 2'-O-methyl-adenosine
  modified_base 3: mod_base = OTHER; note = 2'-Fluoro-guanosine
  modified_base 4: mod_base = OTHER; note = 2'-Fluoro-adenosine
  modified_base 5: mod_base = OTHER; note = 2'-Fluoro-adenosine
  modified_base 6: mod_base = OTHER; note = 2'-Fluoro-uridine
  modified_base 7: mod_base = um
  modified_base 8: mod_base = cm
  modified_base 9: mod_base = OTHER; note = 2'-O-methyl-adenosine
  modified_base 10: mod_base = um
  modified_base 11: mod_base = cm
  modified_base 12: mod_base = um
  modified_base 13: mod_base = cm
  modified_base 14: mod_base = um
  modified_base 15: mod_base = OTHER; note = 2'-O-methyl-adenosine
  modified_base 16: mod_base = gm
  modified_base 17: mod_base = cm
  modified_base 18: mod_base = OTHER; note = 2'-O-methyl-adenosine
  modified_base 19: mod_base = gm
  modified_base 20: mod_base = cm
  modified_base 21: mod_base = cm
  modified_base 22: mod_base = gm
  modified_base 23: mod_base = OTHER; note = docosanamidodiethoxymethanol-adenosine
  modified_base 24: mod_base = OTHER; note = 2'-O-methyl-adenosine
  modified_base 25: mod_base = OTHER; note = 2'-O-methyl-adenosine
  modified_base 26: mod_base = gm
  modified_base 27: mod_base = gm
  modified_base 28: mod_base = cm
  modified_base 29: mod_base = um
  modified_base 30: mod_base = gm
  modified_base 31: mod_base = cm
  source 1..31: mol_type = other RNA

SEQ ID NO: 146 - RNA, 31 nt, synthetic construct; identical to SEQ ID NO: 54
  misc_feature 1^2: note = linked via phosphorothioate
  modified_base 1: mod_base = cm
  modified_base 2: mod_base = OTHER; note = 2'-O-methyl-adenosine
  modified_base 3: mod_base = OTHER; note = 2'-Fluoro-guanosine
  modified_base 4: mod_base = OTHER; note = 2'-Fluoro-adenosine
  modified_base 5: mod_base = OTHER; note = 2'-Fluoro-adenosine
  modified_base 6: mod_base = OTHER; note = 2'-Fluoro-uridine
  modified_base 7: mod_base = um
  modified_base 8: mod_base = cm
  modified_base 9: mod_base = OTHER; note = 2'-O-methyl-adenosine
  modified_base 10: mod_base = um
  modified_base 11: mod_base = cm
  modified_base 12: mod_base = um
  modified_base 13: mod_base = cm
  modified_base 14: mod_base = um
  modified_base 15: mod_base = OTHER; note = 2'-O-methyl-adenosine
  modified_base 16: mod_base = gm
  modified_base 17: mod_base = cm
  modified_base 18: mod_base = OTHER; note = 2'-O-methyl-adenosine
  modified_base 19: mod_base = gm
  modified_base 20: mod_base = cm
  modified_base 21: mod_base = cm
  modified_base 22: mod_base = gm
  modified_base 23: mod_base = OTHER; note = docosanamidodiethoxymethanol-adenosine
  modified_base 24: mod_base = OTHER; note = 2'-O-methyl-adenosine
  modified_base 25: mod_base = OTHER; note = 2'-O-methyl-adenosine
  modified_base 26: mod_base = gm
  modified_base 27: mod_base = gm
  modified_base 28: mod_base = cm
  modified_base 29: mod_base = um
  modified_base 30: mod_base = gm
  modified_base 31: mod_base = cm
  source 1..31: mol_type = other RNA

SEQ ID NO: 147 - RNA, 31 nt, synthetic construct; identical to SEQ ID NO: 54
  misc_feature 1^2: note = linked via phosphorothioate
  modified_base 1: mod_base = cm
  modified_base 2: mod_base = OTHER; note = 2'-O-methyl-adenosine
  modified_base 3: mod_base = OTHER; note = 2'-Fluoro-guanosine
  modified_base 4: mod_base = OTHER; note = 2'-Fluoro-adenosine
  modified_base 5: mod_base = OTHER; note = 2'-Fluoro-adenosine
  modified_base 6: mod_base = OTHER; note = 2'-Fluoro-uridine
  modified_base 7: mod_base = um
  modified_base 8: mod_base = cm
  modified_base 9: mod_base = OTHER; note = 2'-O-methyl-adenosine
  modified_base 10: mod_base = um
  modified_base 11: mod_base = cm
  modified_base 12: mod_base = um
  modified_base 13: mod_base = cm
  modified_base 14: mod_base = um
  modified_base 15: mod_base = OTHER; note = 2'-O-methyl-adenosine
  modified_base 16: mod_base = gm
  modified_base 17: mod_base = cm
  modified_base 18: mod_base = OTHER; note = 2'-O-methyl-adenosine
  modified_base 19: mod_base = gm
  modified_base 20: mod_base = cm
  modified_base 21: mod_base = cm
  modified_base 22: mod_base = gm
  modified_base 23: mod_base = OTHER; note = docosanamidodiethoxymethanol-adenosine
  modified_base 24: mod_base = OTHER; note = 2'-O-methyl-adenosine
  modified_base 25: mod_base = OTHER; note = 2'-O-methyl-adenosine
  modified_base 26: mod_base = gm
  modified_base 27: mod_base = gm
  modified_base 28: mod_base = cm
  modified_base 29: mod_base = um
  modified_base 30: mod_base = gm
  modified_base 31: mod_base = cm
  source 1..31: mol_type = other RNA

SEQ ID NO: 148 - RNA, 22 nt, synthetic construct
  misc_feature 1..4: note = linked via phosphorothioate
  modified_base 1: mod_base = OTHER; note = 4'-O-monomethylphosphonate-2'-O-methylmethyluridine
  modified_base 2: mod_base = OTHER; note = 2'-Fluoro-adenosine
  modified_base 3: mod_base = OTHER; note = 2'-Fluoro-guanosine
  modified_base 4: mod_base = OTHER; note = 2'-Fluoro-adenosine
  modified_base 5: mod_base = OTHER; note = 2'-Fluoro-guanosine
  modified_base 6: mod_base = OTHER; note = 2'-O-methyl-adenosine
  modified_base 7: mod_base = OTHER; note = 2'-Fluoro-uridine
  modified_base 8: mod_base = gm
  modified_base 9: mod_base = OTHER; note = 2'-O-methyl-adenosine
  modified_base 10: mod_base = OTHER; note = 2'-Fluoro-adenosine
  modified_base 11: mod_base = um
  modified_base 12: mod_base = um
  modified_base 13: mod_base = cm
  modified_base 14: mod_base = OTHER; note = 2'-Fluoro-uridine
  modified_base 15: mod_base = gm
  modified_base 16: mod_base = cm
  modified_base 17: mod_base = gm
  modified_base 18: mod_base = cm
  modified_base 19: mod_base = cm
  misc_feature 20..22: note = linked via phosphorothioate
  modified_base 20: mod_base = um
  modified_base 21: mod_base = gm
  modified_base 22: mod_base = gm
  source 1..22: mol_type = other RNA
tagagatgaattctgcgcctgg

SEQ ID NO: 149 - RNA, 22 nt, synthetic construct
  misc_feature 1..4: note = linked via phosphorothioate
  modified_base 1: mod_base = OTHER; note = 4'-O-monomethylphosphonate-2'-O-methylmethyluridine
  modified_base 2: mod_base = OTHER; note = 2'-Fluoro-adenosine
  modified_base 3: mod_base = OTHER; note = 2'-Fluoro-guanosine
  modified_base 4: mod_base = OTHER; note = 2'-Fluoro-adenosine
  modified_base 5: mod_base = OTHER; note = 2'-Fluoro-guanosine
  modified_base 6: mod_base = OTHER; note = 2'-O-methyl-adenosine
  modified_base 7: mod_base = OTHER; note = 2'-Fluoro-uridine
  modified_base 8: mod_base = gm
  modified_base 9: mod_base = OTHER; note = 2'-O-methyl-adenosine
  modified_base 10: mod_base = OTHER; note = 2'-Fluoro-adenosine
  modified_base 11: mod_base = um
  modified_base 12: mod_base = um
  modified_base 13: mod_base = cm
  modified_base 14: mod_base = OTHER; note = 2'-Fluoro-uridine
  modified_base 15: mod_base = gm
  modified_base 16: mod_base = cm
  modified_base 17: mod_base = gm
  modified_base 18: mod_base = cm
  modified_base 19: mod_base = cm
  misc_feature 20..22: note = linked via phosphorothioate
  modified_base 20: mod_base = um
  modified_base 21: mod_base = gm
  modified_base 22: mod_base = gm
  source 1..22: mol_type = other RNA
tagagatgaattctgcgcctgg

SEQ ID NO: 150 - RNA, 22 nt, synthetic construct
  misc_feature 1..4: note = linked via phosphorothioate
  modified_base 1: mod_base = OTHER; note = 4'-O-monomethylphosphonate-2'-O-methylmethyluridine
  modified_base 2: mod_base = OTHER; note = 2'-Fluoro-adenosine
  modified_base 3: mod_base = OTHER; note = 2'-Fluoro-guanosine
  modified_base 4: mod_base = OTHER; note = 2'-Fluoro-adenosine
  modified_base 5: mod_base = OTHER; note = 2'-Fluoro-guanosine
  modified_base 6: mod_base = OTHER; note = 2'-O-methyl-adenosine
  modified_base 7: mod_base = OTHER; note = 2'-Fluoro-uridine
  modified_base 8: mod_base = gm
  modified_base 9: mod_base = OTHER; note = 2'-O-methyl-adenosine
  modified_base 10: mod_base = OTHER; note = 2'-Fluoro-adenosine
  modified_base 11: mod_base = um
  modified_base 12: mod_base = um
  modified_base 13: mod_base = cm
  modified_base 14: mod_base = OTHER; note = 2'-Fluoro-uridine
  modified_base 15: mod_base = gm
  modified_base 16: mod_base = cm
  modified_base 17: mod_base = gm
  modified_base 18: mod_base = cm
  modified_base 19: mod_base = cm
  misc_feature 20..22: note = linked via phosphorothioate
  modified_base 20: mod_base = um
  modified_base 21: mod_base = gm
  modified_base 22: mod_base = gm
  source 1..22: mol_type = other RNA
tagagatgaattctgcgcctgg

SEQ ID NO: 151 - RNA, 22 nt, synthetic construct
  misc_feature 1..4: note = linked via phosphorothioate
  modified_base 1: mod_base = OTHER; note = 4'-O-monomethylphosphonate-2'-O-methylmethyluridine
  modified_base 2: mod_base = OTHER; note = 2'-Fluoro-adenosine
  modified_base 3: mod_base = OTHER; note = 2'-Fluoro-guanosine
  modified_base 4: mod_base = OTHER; note = 2'-Fluoro-adenosine
  modified_base 5: mod_base = OTHER; note = 2'-Fluoro-guanosine
  modified_base 6: mod_base = OTHER; note = 2'-O-methyl-adenosine
  modified_base 7: mod_base = OTHER; note = 2'-Fluoro-uridine
  modified_base 8: mod_base = gm
  modified_base 9: mod_base = OTHER; note = 2'-O-methyl-adenosine
  modified_base 10: mod_base = OTHER; note = 2'-Fluoro-adenosine
  modified_base 11: mod_base = um
  modified_base 12: mod_base = um
  modified_base 13: mod_base = cm
  modified_base 14: mod_base = OTHER; note = 2'-Fluoro-uridine
  modified_base 15: mod_base = gm
  modified_base 16: mod_base = cm
  modified_base 17: mod_base = gm
  modified_base 18: mod_base = cm
  modified_base 19: mod_base = cm
  misc_feature 20..22: note = linked via phosphorothioate
  modified_base 20: mod_base = um
  modified_base 21: mod_base = gm
  modified_base 22: mod_base = gm
  source 1..22: mol_type = other RNA
tagagatgaattctgcgcctgg

SEQ ID NO: 152 - RNA, 22 nt, synthetic construct
  misc_feature 1..4: note = linked via phosphorothioate
  modified_base 1: mod_base = OTHER; note = 4'-O-monomethylphosphonate-2'-O-methylmethyluridine
  modified_base 2: mod_base = OTHER; note = 2'-Fluoro-adenosine
  modified_base 3: mod_base = OTHER; note = 2'-Fluoro-guanosine
  modified_base 4: mod_base = OTHER; note = 2'-Fluoro-adenosine
  modified_base 5: mod_base = OTHER; note = 2'-Fluoro-guanosine
  modified_base 6: mod_base = OTHER; note = 2'-O-methyl-adenosine
  modified_base 7: mod_base = OTHER; note = 2'-Fluoro-uridine
  modified_base 8: mod_base = gm
  modified_base 9: mod_base = OTHER; note = 2'-O-methyl-adenosine
  modified_base 10: mod_base = OTHER; note = 2'-Fluoro-adenosine
  modified_base 11: mod_base = um
  modified_base 12: mod_base = um
  modified_base 13: mod_base = cm
  modified_base 14: mod_base = OTHER; note = 2'-Fluoro-uridine
  modified_base 15: mod_base = gm
  modified_base 16: mod_base = cm
  modified_base 17: mod_base = gm
  modified_base 18: mod_base = cm
  modified_base 19: mod_base = cm
  misc_feature 20..22: note = linked via phosphorothioate
  modified_base 20: mod_base = um
  modified_base 21: mod_base = gm
  modified_base 22: mod_base = gm
  source 1..22: mol_type = other RNA
tagagatgaattctgcgcctgg

SEQ ID NO: 153 - RNA, 22 nt, synthetic construct
  misc_feature 1..4: note = linked via phosphorothioate
  modified_base 1: mod_base = OTHER; note = 4'-O-monomethylphosphonate-2'-O-methylmethyluridine
  modified_base 2: mod_base = OTHER; note = 2'-Fluoro-adenosine
  modified_base 3: mod_base = OTHER; note = 2'-Fluoro-guanosine
  modified_base 4: mod_base = OTHER; note = 2'-Fluoro-adenosine
  modified_base 5: mod_base = OTHER; note = 2'-Fluoro-guanosine
  modified_base 6: mod_base = OTHER; note = 2'-O-methyl-adenosine
  modified_base 7: mod_base = OTHER; note = 2'-Fluoro-uridine
  modified_base 8: mod_base = gm
  modified_base 9: mod_base = OTHER; note = 2'-O-methyl-adenosine
  modified_base 10: mod_base = OTHER; note = 2'-Fluoro-adenosine
  modified_base 11: mod_base = um
  modified_base 12: mod_base = um
  modified_base 13: mod_base = cm
  modified_base 14: mod_base = OTHER; note = 2'-Fluoro-uridine
  modified_base 15: mod_base = gm
  modified_base 16: mod_base = cm
  modified_base 17: mod_base = gm
  modified_base 18: mod_base = cm
  modified_base 19: mod_base = cm
  misc_feature 20..22: note = linked via phosphorothioate
  modified_base 20: mod_base = um
  modified_base 21: mod_base = gm
  modified_base 22: mod_base = gm
  source 1..22: mol_type = other RNA
tagagatgaattctgcgcctgg

SEQ ID NO: 154 - RNA, 22 nt, synthetic construct
  misc_feature 1..4: note = linked via phosphorothioate
  modified_base 1: mod_base = OTHER; note = 4'-O-monomethylphosphonate-2'-O-methylmethyluridine
  modified_base 2: mod_base = OTHER; note = 2'-Fluoro-adenosine
  modified_base 3: mod_base = OTHER; note = 2'-Fluoro-guanosine
  modified_base 4: mod_base = OTHER; note = 2'-Fluoro-adenosine
  modified_base 5: mod_base = OTHER; note = 2'-Fluoro-guanosine
  modified_base 6: mod_base = OTHER; note = 2'-O-methyl-adenosine
  modified_base 7: mod_base = OTHER; note = 2'-Fluoro-uridine
  modified_base 8: mod_base = gm
  modified_base 9: mod_base = OTHER; note = 2'-O-methyl-adenosine
  modified_base 10: mod_base = OTHER; note = 2'-Fluoro-adenosine
  modified_base 11: mod_base = um
  modified_base 12: mod_base = um
  modified_base 13: mod_base = cm
  modified_base 14: mod_base = OTHER; note = 2'-Fluoro-uridine
  modified_base 15: mod_base = gm
  modified_base 16: mod_base = cm
  modified_base 17: mod_base = gm
  modified_base 18: mod_base = cm
  modified_base 19: mod_base = cm
  misc_feature 20..22: note = linked via phosphorothioate
  modified_base 20: mod_base = um
  modified_base 21: mod_base = gm
  modified_base 22: mod_base = gm
  source 1..22: mol_type = other RNA
tagagatgaattctgcgcctgg

SEQ ID NO: 155 - RNA, 22 nt, synthetic construct
  misc_feature 1..4: note = linked via phosphorothioate
  modified_base 1: mod_base = OTHER; note = 4'-O-monomethylphosphonate-2'-O-methylmethyluridine
  modified_base 2: mod_base = OTHER; note = 2'-Fluoro-adenosine
  modified_base 3: mod_base = OTHER; note = 2'-Fluoro-guanosine
  modified_base 4: mod_base = OTHER; note = 2'-Fluoro-adenosine
  modified_base 5: mod_base = OTHER; note = 2'-Fluoro-guanosine
  modified_base 6: mod_base = OTHER; note = 2'-O-methyl-adenosine
  modified_base 7: mod_base = OTHER; note = 2'-Fluoro-uridine
  modified_base 8: mod_base = gm
  modified_base 9: mod_base = OTHER; note = 2'-O-methyl-adenosine
  modified_base 10: mod_base = OTHER; note = 2'-Fluoro-adenosine
  modified_base 11: mod_base = um
  modified_base 12: mod_base = um
  modified_base 13: mod_base = cm
  modified_base 14: mod_base = OTHER; note = 2'-Fluoro-uridine
  modified_base 15: mod_base = gm
  modified_base 16: mod_base = cm
  modified_base 17: mod_base = gm
  modified_base 18: mod_base = cm
  modified_base 19: mod_base = cm
  misc_feature 20..22: note = linked via phosphorothioate
  modified_base 20: mod_base = um
  modified_base 21: mod_base = gm
  modified_base 22: mod_base = gm
  source 1..22: mol_type = other RNA
tagagatgaattctgcgcctgg

SEQ ID NO: 156 - RNA, 22 nt, synthetic construct
  misc_feature 1..4: note = linked via phosphorothioate
  modified_base 1: mod_base = OTHER; note = 4'-O-monomethylphosphonate-2'-O-methylmethyluridine
  modified_base 2: mod_base = OTHER; note = 2'-Fluoro-adenosine
  modified_base 3: mod_base = OTHER; note = 2'-Fluoro-guanosine
  modified_base 4: mod_base = OTHER; note = 2'-Fluoro-adenosine
  modified_base 5: mod_base = OTHER; note = 2'-Fluoro-guanosine
  modified_base 6: mod_base = OTHER; note = 2'-O-methyl-adenosine
  modified_base 7: mod_base = OTHER; note = 2'-Fluoro-uridine
  modified_base 8: mod_base = gm
  modified_base 9: mod_base = OTHER; note = 2'-O-methyl-adenosine
  modified_base 10: mod_base = OTHER; note = 2'-Fluoro-adenosine
  modified_base 11: mod_base = um
  modified_base 12: mod_base = um
  modified_base 13: mod_base = cm
  modified_base 14: mod_base = OTHER; note = 2'-Fluoro-uridine
  modified_base 15: mod_base = gm
  modified_base 16: mod_base = cm
  modified_base 17: mod_base = gm
  modified_base 18: mod_base = cm
  modified_base 19: mod_base = cm
  misc_feature 20..22: note = linked via phosphorothioate
  modified_base 20: mod_base = um
  modified_base 21: mod_base = gm
  modified_base 22: mod_base = gm
  source 1..22: mol_type = other RNA
tagagatgaattctgcgcctgg

SEQ ID NO: 157 - RNA, 22 nt, synthetic construct
  misc_feature 1..4: note = linked via phosphorothioate
  modified_base 1: mod_base = OTHER; note = 4'-O-monomethylphosphonate-2'-O-methylmethyluridine
  modified_base 2: mod_base = OTHER; note = 2'-Fluoro-adenosine
  modified_base 3: mod_base = OTHER; note = 2'-Fluoro-guanosine
  modified_base 4: mod_base = OTHER; note = 2'-Fluoro-adenosine
  modified_base 5: mod_base = OTHER; note = 2'-Fluoro-guanosine
  modified_base 6: mod_base = OTHER; note = 2'-O-methyl-adenosine
  modified_base 7: mod_base = OTHER; note = 2'-Fluoro-uridine
  modified_base 8: mod_base = gm
  modified_base 9: mod_base = OTHER; note = 2'-O-methyl-adenosine
  modified_base 10: mod_base = OTHER; note = 2'-Fluoro-adenosine
  modified_base 11: mod_base = um
  modified_base 12: mod_base = um
  modified_base 13: mod_base = cm
  modified_base 14: mod_base = OTHER; note = 2'-Fluoro-uridine
  modified_base 15: mod_base = gm
  modified_base 16: mod_base = cm
  modified_base 17: mod_base = gm
  modified_base 18: mod_base = cm
  modified_base 19: mod_base = cm
  misc_feature 20..22: note = linked via phosphorothioate
  modified_base 20: mod_base = um
  modified_base 21: mod_base = gm
  modified_base 22: mod_base = gm
  source 1..22: mol_type = other RNA
tagagatgaattctgcgcctgg

SEQ ID NO: 158 - RNA, 22 nt, synthetic construct
  misc_feature 1..4: note = linked via phosphorothioate
  modified_base 1: mod_base = OTHER; note = 4'-O-monomethylphosphonate-2'-O-methylmethyluridine
  modified_base 2: mod_base = OTHER; note = 2'-Fluoro-adenosine
  modified_base 3: mod_base = OTHER; note = 2'-Fluoro-guanosine
  modified_base 4: mod_base = OTHER; note = 2'-Fluoro-adenosine
  modified_base 5: mod_base = OTHER; note = 2'-Fluoro-guanosine
  modified_base 6: mod_base = OTHER; note = 2'-O-methyl-adenosine
  modified_base 7: mod_base = OTHER; note = 2'-Fluoro-uridine
  modified_base 8: mod_base = gm
  modified_base 9: mod_base = OTHER; note = 2'-O-methyl-adenosine
  modified_base 10: mod_base = OTHER; note = 2'-Fluoro-adenosine
  modified_base 11: mod_base = um
  modified_base 12: mod_base = um
  modified_base 13: mod_base = cm
  modified_base 14: mod_base = OTHER; note = 2'-Fluoro-uridine
  modified_base 15: mod_base = gm
  modified_base 16: mod_base = cm
  modified_base 17: mod_base = gm
  modified_base 18: mod_base = cm
  modified_base 19: mod_base = cm
  misc_feature 20..22: note = linked via phosphorothioate
  modified_base 20: mod_base = um
  modified_base 21: mod_base = gm
  modified_base 22: mod_base = gm
  source 1..22: mol_type = other RNA
tagagatgaattctgcgcctgg

SEQ ID NO: 159 - RNA, 22 nt, synthetic construct
  misc_feature 1..4: note = linked via phosphorothioate
  modified_base 1: mod_base = OTHER; note = 4'-O-monomethylphosphonate-2'-O-methylmethyluridine
  modified_base 2: mod_base = OTHER; note = 2'-Fluoro-adenosine
  modified_base 3: mod_base = OTHER; note = 2'-Fluoro-guanosine
  modified_base 4: mod_base = OTHER; note = 2'-Fluoro-adenosine
  modified_base 5: mod_base = OTHER; note = 2'-Fluoro-guanosine
  modified_base 6: mod_base = OTHER; note = 2'-O-methyl-adenosine
  modified_base 7: mod_base = OTHER; note = 2'-Fluoro-uridine
  modified_base 8: mod_base = gm
  modified_base 9: mod_base = OTHER; note = 2'-O-methyl-adenosine
  modified_base 10: mod_base = OTHER; note = 2'-Fluoro-adenosine
  modified_base 11: mod_base = um
  modified_base 12: mod_base = um
  modified_base 13: mod_base = cm
  modified_base 14: mod_base = OTHER; note = 2'-Fluoro-uridine
  modified_base 15: mod_base = gm
  modified_base 16: mod_base = cm
  modified_base 17: mod_base = gm
  modified_base 18: mod_base = cm
  modified_base 19: mod_base = cm
  misc_feature 20..22: note = linked via phosphorothioate
  modified_base 20: mod_base = um
  modified_base 21: mod_base = gm
  modified_base 22: mod_base = gm
  source 1..22: mol_type = other RNA
tagagatgaattctgcgcctgg

SEQ ID NO: 160 - RNA, 22 nt, synthetic construct
  misc_feature 1..4: note = linked via phosphorothioate
  modified_base 1: mod_base = OTHER; note = 4'-O-monomethylphosphonate-2'-O-methylmethyluridine
  modified_base 2: mod_base = OTHER; note = 2'-Fluoro-adenosine
  modified_base 3: mod_base = OTHER; note = 2'-Fluoro-guanosine
  modified_base 4: mod_base = OTHER; note = 2'-Fluoro-adenosine
  modified_base 5: mod_base = OTHER; note = 2'-Fluoro-guanosine
  modified_base 6: mod_base = OTHER; note = 2'-O-methyl-adenosine
  modified_base 7: mod_base = OTHER; note = 2'-Fluoro-uridine
  modified_base 8: mod_base = gm
  modified_base 9: mod_base = OTHER; note = 2'-O-methyl-adenosine
  modified_base 10: mod_base = OTHER; note = 2'-Fluoro-adenosine
  modified_base 11: mod_base = um
  modified_base 12: mod_base = um
  modified_base 13: mod_base = cm
  modified_base 14: mod_base = OTHER; note = 2'-Fluoro-uridine
  modified_base 15: mod_base = gm
  modified_base 16: mod_base = cm
  modified_base 17: mod_base = gm
  modified_base 18: mod_base = cm
  modified_base 19: mod_base = cm
  misc_feature 20..22: note = linked via phosphorothioate
  modified_base 20: mod_base = um
  modified_base 21: mod_base = gm
  modified_base 22: mod_base = gm
  source 1..22: mol_type = other RNA
tagagatgaattctgcgcctgg

SEQ ID NO: 161 - RNA, 22 nt, synthetic construct
  misc_feature 1..4: note = linked via phosphorothioate
  modified_base 1: mod_base = OTHER; note = 4'-O-monomethylphosphonate-2'-O-methylmethyluridine
  modified_base 2: mod_base = OTHER; note = 2'-Fluoro-adenosine
  modified_base 3: mod_base = OTHER; note = 2'-Fluoro-guanosine
  modified_base 4: mod_base = OTHER; note = 2'-Fluoro-adenosine
  modified_base 5: mod_base = OTHER; note = 2'-Fluoro-guanosine
  modified_base 6: mod_base = OTHER; note = 2'-O-methyl-adenosine
  modified_base 7: mod_base = OTHER; note = 2'-Fluoro-uridine
  modified_base 8: mod_base = gm
  modified_base 9: mod_base = OTHER; note = 2'-O-methyl-adenosine
  modified_base 10: mod_base = OTHER; note = 2'-Fluoro-adenosine
  modified_base 11: mod_base = um
  modified_base 12: mod_base = um
  modified_base 13: mod_base = cm
  modified_base 14: mod_base = OTHER; note = 2'-Fluoro-uridine
  modified_base 15: mod_base = gm
  modified_base 16: mod_base = cm
  modified_base 17: mod_base = gm
  modified_base 18: mod_base = cm
  modified_base 19: mod_base = cm
  misc_feature 20..22: note = linked via phosphorothioate
  modified_base 20: mod_base = um
  modified_base 21: mod_base = gm
  modified_base 22: mod_base = gm
  source 1..22: mol_type = other RNA
tagagatgaattctgcgcctgg

SEQ ID NO: 162 - RNA, 22 nt, synthetic construct
  misc_feature 1..4: note = linked via phosphorothioate
  modified_base 1: mod_base = OTHER; note = 4'-O-monomethylphosphonate-2'-O-methylmethyluridine
  modified_base 2: mod_base = OTHER; note = 2'-Fluoro-adenosine
  modified_base 3: mod_base = OTHER; note = 2'-Fluoro-guanosine
  modified_base 4: mod_base = OTHER; note = 2'-Fluoro-adenosine
  modified_base 5: mod_base = OTHER; note = 2'-Fluoro-guanosine
  modified_base 6: mod_base = OTHER; note = 2'-O-methyl-adenosine
  modified_base 7: mod_base = OTHER; note = 2'-Fluoro-uridine
  modified_base 8: mod_base = gm
  modified_base 9: mod_base = OTHER; note = 2'-O-methyl-adenosine
  modified_base 10: mod_base = OTHER; note = 2'-Fluoro-adenosine
  modified_base 11: mod_base = um
  modified_base 12: mod_base = um
  modified_base 13: mod_base = cm
  modified_base 14: mod_base = OTHER; note = 2'-Fluoro-uridine
  modified_base 15: mod_base = gm
  modified_base 16: mod_base = cm
  modified_base 17: mod_base = gm
  modified_base 18: mod_base = cm
  modified_base 19: mod_base = cm
  misc_feature 20..22: note = linked via phosphorothioate
  modified_base 20: mod_base = um
  modified_base 21: mod_base = gm
  modified_base 22: mod_base = gm
  source 1..22: mol_type = other RNA
tagagatgaattctgcgcctgg

SEQ ID NO: 163 - RNA, 22 nt, synthetic construct
  misc_feature 1..4: note = linked via phosphorothioate
  modified_base 1: mod_base = OTHER; note = 4'-O-monomethylphosphonate-2'-O-methylmethyluridine
  modified_base 2: mod_base = OTHER; note = 2'-Fluoro-adenosine
  modified_base 3: mod_base = OTHER; note = 2'-Fluoro-guanosine
  modified_base 4: mod_base = OTHER; note = 2'-Fluoro-adenosine
  modified_base 5: mod_base = OTHER; note = 2'-Fluoro-guanosine
  modified_base 6: mod_base = OTHER; note = 2'-O-methyl-adenosine
  modified_base 7: mod_base = OTHER; note = 2'-Fluoro-uridine
  modified_base 8: mod_base = gm
  modified_base 9: mod_base = OTHER; note = 2'-O-methyl-adenosine
  modified_base 10: mod_base = OTHER; note = 2'-Fluoro-adenosine
  modified_base 11: mod_base = um
  modified_base 12: mod_base = um
  modified_base 13: mod_base = cm
  modified_base 14: mod_base = OTHER; note = 2'-Fluoro-uridine
  modified_base 15: mod_base = gm
  modified_base 16: mod_base = cm
  modified_base 17: mod_base = gm
  modified_base 18: mod_base = cm
  modified_base 19: mod_base = cm
  misc_feature 20..22: note = linked via phosphorothioate
  modified_base 20: mod_base = um
  modified_base 21: mod_base = gm
  modified_base 22: mod_base = gm
  source 1..22: mol_type = other RNA
tagagatgaattctgcgcctgg

SEQ ID NO: 164 - RNA, 22 nt, synthetic construct
  misc_feature 1..4: note = linked via phosphorothioate
  modified_base 1: mod_base = OTHER; note = 4'-O-monomethylphosphonate-2'-O-methylmethyluridine
  modified_base 2: mod_base = OTHER; note = 2'-Fluoro-adenosine
  modified_base 3: mod_base = OTHER; note = 2'-Fluoro-guanosine
  modified_base 4: mod_base = OTHER; note = 2'-Fluoro-adenosine
  modified_base 5: mod_base = OTHER; note = 2'-Fluoro-guanosine
  modified_base 6: mod_base = OTHER; note = 2'-O-methyl-adenosine
  modified_base 7: mod_base = OTHER; note = 2'-Fluoro-uridine
  modified_base 8: mod_base = gm
  modified_base 9: mod_base = OTHER; note = 2'-O-methyl-adenosine
  modified_base 10: mod_base = OTHER; note = 2'-Fluoro-adenosine
  modified_base 11: mod_base = um
  modified_base 12: mod_base = um
  modified_base 13: mod_base = cm
  modified_base 14: mod_base = OTHER; note = 2'-Fluoro-uridine
  modified_base 15: mod_base = gm
  modified_base 16: mod_base = cm
  modified_base 17: mod_base = gm
  modified_base 18: mod_base = cm
  modified_base 19: mod_base = cm
  misc_feature 20..22: note = linked via phosphorothioate
  modified_base 20: mod_base = um
  modified_base 21: mod_base = gm
  modified_base 22: mod_base = gm
  source 1..22: mol_type = other RNA
tagagatgaattctgcgcctgg

SEQ ID NO: 165 - RNA, 22 nt, synthetic construct
  misc_feature 1..4: note = linked via phosphorothioate
  modified_base 1: mod_base = OTHER; note = 4'-O-monomethylphosphonate-2'-O-methylmethyluridine
  modified_base 2: mod_base = OTHER; note = 2'-Fluoro-adenosine
  modified_base 3: mod_base = OTHER; note = 2'-Fluoro-guanosine
  modified_base 4: mod_base = OTHER; note = 2'-Fluoro-adenosine
  modified_base 5: mod_base = OTHER; note = 2'-Fluoro-guanosine
  modified_base 6: mod_base = OTHER; note = 2'-O-methyl-adenosine
  modified_base 7: mod_base = OTHER; note = 2'-Fluoro-uridine
  modified_base 8: mod_base = gm
  modified_base 9: mod_base = OTHER; note = 2'-O-methyl-adenosine
  modified_base 10: mod_base = OTHER; note = 2'-Fluoro-adenosine
  modified_base 11: mod_base = um
  modified_base 12: mod_base = um
  modified_base 13: mod_base = cm
  modified_base 14: mod_base = OTHER; note = 2'-Fluoro-uridine
  modified_base 15: mod_base = gm
  modified_base 16: mod_base = cm
  modified_base 17: mod_base = gm
  modified_base 18: mod_base = cm
  modified_base 19: mod_base = cm
  misc_feature 20..22: note = linked via phosphorothioate
  modified_base 20: mod_base = um
  modified_base 21: mod_base = gm
  modified_base 22: mod_base = gm
  source 1..22: mol_type = other RNA
tagagatgaattctgcgcctgg

SEQ ID NO: 166 - RNA, 22 nt, synthetic construct
  misc_feature 1..4: note = linked via phosphorothioate
  modified_base 1: mod_base = OTHER; note = 4'-O-monomethylphosphonate-2'-O-methylmethyluridine
  modified_base 2: mod_base = OTHER; note = 2'-Fluoro-adenosine
  modified_base 3: mod_base = OTHER; note = 2'-Fluoro-guanosine
  modified_base 4: mod_base = OTHER; note = 2'-Fluoro-adenosine
  modified_base 5: mod_base = OTHER; note = 2'-Fluoro-guanosine
  modified_base 6: mod_base = OTHER; note = 2'-O-methyl-adenosine
  modified_base 7: mod_base = OTHER; note = 2'-Fluoro-uridine
  modified_base 8: mod_base = gm
  modified_base 9: mod_base = OTHER; note = 2'-O-methyl-adenosine
  modified_base 10: mod_base = OTHER; note = 2'-Fluoro-adenosine
  modified_base 11: mod_base = um
  modified_base 12: mod_base = um
  modified_base 13: mod_base = cm
  modified_base 14: mod_base = OTHER; note = 2'-Fluoro-uridine
  modified_base 15: mod_base = gm
  modified_base 16: mod_base = cm
  modified_base 17: mod_base = gm
  modified_base 18: mod_base = cm
  modified_base 19: mod_base = cm
  misc_feature 20..22: note = linked via phosphorothioate
  modified_base 20: mod_base = um
  modified_base 21: mod_base = gm
  modified_base 22: mod_base = gm
  source 1..22: mol_type = other RNA
tagagatgaattctgcgcctgg

SEQ ID NO: 167 - RNA, 22 nt, synthetic construct
  misc_feature 1..4: note = linked via phosphorothioate
  modified_base 1: mod_base = OTHER; note = 4'-O-monomethylphosphonate-2'-O-methylmethyluridine
  modified_base 2: mod_base = OTHER; note = 2'-Fluoro-adenosine
  modified_base 3: mod_base = OTHER; note = 2'-Fluoro-guanosine
  modified_base 4: mod_base = OTHER; note = 2'-Fluoro-adenosine
  modified_base 5: mod_base = OTHER; note = 2'-Fluoro-guanosine
  modified_base 6: mod_base = OTHER; note = 2'-O-methyl-adenosine
  modified_base 7: mod_base = OTHER; note = 2'-Fluoro-uridine
  modified_base 8: mod_base = gm
  modified_base 9: mod_base = OTHER; note = 2'-O-methyl-adenosine
  modified_base 10: mod_base = OTHER; note = 2'-Fluoro-adenosine
  modified_base 11: mod_base = um
  modified_base 12: mod_base = um
  modified_base 13: mod_base = cm
  modified_base 14: mod_base = OTHER; note = 2'-Fluoro-uridine
  modified_base 15: mod_base = gm
  modified_base 16: mod_base = cm
  modified_base 17: mod_base = gm
  modified_base 18: mod_base = cm
  modified_base 19: mod_base = cm
  misc_feature 20..22: note = linked via phosphorothioate
  modified_base 20: mod_base = um
  modified_base 21: mod_base = gm
  modified_base 22: mod_base = gm
  source 1..22: mol_type = other RNA
tagagatgaattctgcgcctgg

SEQ ID NO: 168 - RNA, 22 nt, synthetic construct
  misc_feature 1..4: note = linked via phosphorothioate
  modified_base 1: mod_base = OTHER; note = 4'-O-monomethylphosphonate-2'-O-methylmethyluridine
  modified_base 2: mod_base = OTHER; note = 2'-Fluoro-adenosine
  modified_base 3: mod_base = OTHER; note = 2'-Fluoro-guanosine
  modified_base 4: mod_base = OTHER; note = 2'-Fluoro-adenosine
  modified_base 5: mod_base = OTHER; note = 2'-Fluoro-guanosine
  modified_base 6: mod_base = OTHER; note = 2'-O-methyl-adenosine
  modified_base 7: mod_base = OTHER; note = 2'-Fluoro-uridine
  modified_base 8: mod_base = gm
  modified_base 9: mod_base = OTHER; note = 2'-O-methyl-adenosine
  modified_base 10: mod_base = OTHER; note = 2'-Fluoro-adenosine
  modified_base 11: mod_base = um
  modified_base 12: mod_base = um
  modified_base 13: mod_base = cm
  modified_base 14: mod_base = OTHER; note = 2'-Fluoro-uridine
  modified_base 15: mod_base = gm
  modified_base 16: mod_base = cm
  modified_base 17: mod_base = gm
  modified_base 18: mod_base = cm
  modified_base 19: mod_base = cm
  misc_feature 20..22: note = linked via phosphorothioate
  modified_base 20: mod_base = um
  modified_base 21: mod_base = gm
  modified_base 22: mod_base = gm
  source 1..22: mol_type = other RNA
tagagatgaattctgcgcctgg

SEQ ID NO: 169 - RNA, 22 nt, synthetic construct
  misc_feature 1..4: note = linked via phosphorothioate
  modified_base 1: mod_base = OTHER; note = 4'-O-monomethylphosphonate-2'-O-methylmethyluridine
  modified_base 2: mod_base = OTHER; note = 2'-Fluoro-adenosine
  modified_base 3: mod_base = OTHER; note = 2'-Fluoro-guanosine
  modified_base 4: mod_base = OTHER; note = 2'-Fluoro-adenosine
  modified_base 5: mod_base = OTHER; note = 2'-Fluoro-guanosine
  modified_base 6: mod_base = OTHER; note = 2'-O-methyl-adenosine
  modified_base 7: mod_base = OTHER; note = 2'-Fluoro-uridine
  modified_base 8: mod_base = gm
  modified_base 9: mod_base = OTHER; note = 2'-O-methyl-adenosine
  modified_base 10: mod_base = OTHER; note = 2'-Fluoro-adenosine
  modified_base 11: mod_base = um
  modified_base 12: mod_base = um
  modified_base 13: mod_base = cm
  modified_base 14: mod_base = OTHER; note = 2'-Fluoro-uridine
  modified_base 15: mod_base = gm
  modified_base 16: mod_base = cm
  modified_base 17: mod_base = gm
  modified_base 18: mod_base = cm
  modified_base 19: mod_base = cm
  misc_feature 20..22: note = linked via phosphorothioate
  modified_base 20: mod_base = um
  modified_base 21: mod_base = gm
  modified_base 22: mod_base = gm
  source 1..22: mol_type = other RNA
tagagatgaattctgcgcctgg

SEQ ID NO: 170 - RNA, 22 nt, synthetic construct
  misc_feature 1..4: note = linked via phosphorothioate
  modified_base 1: mod_base = OTHER; note = 4'-O-monomethylphosphonate-2'-O-methylmethyluridine
  modified_base 2: mod_base = OTHER; note = 2'-Fluoro-adenosine
  modified_base 3: mod_base = OTHER; note = 2'-Fluoro-guanosine
  modified_base 4: mod_base = OTHER; note = 2'-Fluoro-adenosine
  modified_base 5: mod_base = OTHER; note = 2'-Fluoro-guanosine
  modified_base 6: mod_base = OTHER; note = 2'-O-methyl-adenosine
  modified_base 7: mod_base = OTHER; note = 2'-Fluoro-uridine
  modified_base 8: mod_base = gm
  modified_base 9: mod_base = OTHER; note = 2'-O-methyl-adenosine
  modified_base 10: mod_base = OTHER; note = 2'-Fluoro-adenosine
  modified_base 11: mod_base = um
  modified_base 12: mod_base = um
  modified_base 13: mod_base = cm
  modified_base 14: mod_base = OTHER; note = 2'-Fluoro-uridine
  modified_base 15: mod_base = gm
  modified_base 16: mod_base = cm
  modified_base 17: mod_base = gm
  modified_base 18: mod_base = cm
  modified_base 19: mod_base = cm
  misc_feature 20..22: note = linked via phosphorothioate
  modified_base 20: mod_base = um
  modified_base 21: mod_base = gm
  modified_base 22: mod_base = gm
  source 1..22: mol_type = other RNA
tagagatgaattctgcgcctgg

SEQ ID NO: 171 - RNA, 22 nt, synthetic construct
  misc_feature 1..4: note = linked via phosphorothioate
  modified_base 1: mod_base = OTHER; note = 4'-O-monomethylphosphonate-2'-O-methylmethyluridine
  modified_base 2: mod_base = OTHER; note = 2'-Fluoro-adenosine
  modified_base 3: mod_base = OTHER; note = 2'-Fluoro-guanosine
  modified_base 4: mod_base = OTHER; note = 2'-Fluoro-adenosine
  modified_base 5: mod_base = OTHER; note = 2'-Fluoro-guanosine
  modified_base 6: mod_base = OTHER; note = 2'-O-methyl-adenosine
  modified_base 7: mod_base = OTHER; note = 2'-Fluoro-uridine
  modified_base 8: mod_base = gm
  modified_base 9: mod_base = OTHER; note = 2'-O-methyl-adenosine
  modified_base 10: mod_base = OTHER; note = 2'-Fluoro-adenosine
  modified_base 11: mod_base = um
  modified_base 12: mod_base = um
  modified_base 13: mod_base = cm
  modified_base 14: mod_base = OTHER; note = 2'-Fluoro-uridine
  modified_base 15: mod_base = gm
  modified_base 16: mod_base = cm
  modified_base 17: mod_base = gm
  modified_base 18: mod_base = cm
  modified_base 19: mod_base = cm
  misc_feature 20..22: note = linked via phosphorothioate
  modified_base 20: mod_base = um
  modified_base 21: mod_base = gm
  modified_base 22: mod_base = gm
  source 1..22: mol_type = other RNA
tagagatgaattctgcgcctgg

SEQ ID NO: 172 - RNA, 22 nt, synthetic construct
  misc_feature 1..4: note = linked via phosphorothioate
  modified_base 1: mod_base = OTHER; note = 4'-O-monomethylphosphonate-2'-O-methylmethyluridine
  modified_base 2: mod_base = OTHER; note = 2'-Fluoro-adenosine
  modified_base 3: mod_base = OTHER; note = 2'-Fluoro-guanosine
  modified_base 4: mod_base = OTHER; note = 2'-Fluoro-adenosine
  modified_base 5: mod_base = OTHER; note = 2'-Fluoro-guanosine
  modified_base 6: mod_base = OTHER; note = 2'-O-methyl-adenosine
  modified_base 7: mod_base = OTHER; note = 2'-Fluoro-uridine
  modified_base 8: mod_base = gm
  modified_base 9: mod_base = OTHER; note = 2'-O-methyl-adenosine
  modified_base 10: mod_base = OTHER; note = 2'-Fluoro-adenosine
  modified_base 11: mod_base = um
  modified_base 12: mod_base = um
  modified_base 13: mod_base = cm
  modified_base 14: mod_base = OTHER; note = 2'-Fluoro-uridine
  modified_base 15: mod_base = gm
  modified_base 16: mod_base = cm
  modified_base 17: mod_base = gm
  modified_base 18: mod_base = cm
  modified_base 19: mod_base = cm
  misc_feature 20..22: note = linked via phosphorothioate
  modified_base 20: mod_base = um
  modified_base 21: mod_base = gm
  modified_base 22: mod_base = gm
  source 1..22: mol_type = other RNA
tagagatgaattctgcgcctgg

SEQ ID NO: 173 - RNA, 22 nt, synthetic construct
  misc_feature 1..4: note = linked via phosphorothioate
  modified_base 1: mod_base = OTHER; note = 4'-O-monomethylphosphonate-2'-O-methylmethyluridine
  modified_base 2: mod_base = OTHER; note = 2'-Fluoro-adenosine
  modified_base 3: mod_base = OTHER; note = 2'-Fluoro-guanosine
  modified_base 4: mod_base = OTHER; note = 2'-Fluoro-adenosine
  modified_base 5: mod_base = OTHER; note = 2'-Fluoro-guanosine
  modified_base 6: mod_base = OTHER; note = 2'-O-methyl-adenosine
  modified_base 7: mod_base = OTHER; note = 2'-Fluoro-uridine
  modified_base 8: mod_base = gm
  modified_base 9: mod_base = OTHER; note = 2'-O-methyl-adenosine
  modified_base 10: mod_base = OTHER; note = 2'-Fluoro-adenosine
  modified_base 11: mod_base = um
  modified_base 12: mod_base = um
  modified_base 13: mod_base = cm
  modified_base 14: mod_base = OTHER; note = 2'-Fluoro-uridine
  modified_base 15: mod_base = gm
  modified_base 16: mod_base = cm
  modified_base 17: mod_base = gm
  modified_base 18: mod_base = cm
  modified_base 19: mod_base = cm
  misc_feature 20..22: note = linked via phosphorothioate
  modified_base 20: mod_base = um
  modified_base 21: mod_base = gm
  modified_base 22: mod_base = gm
  source 1..22: mol_type = other RNA
tagagatgaattctgcgcctgg

SEQ ID NO: 174 - RNA, 22 nt, synthetic construct
  misc_feature 1..4: note = linked via phosphorothioate
  modified_base 1: mod_base = OTHER; note = 4'-O-monomethylphosphonate-2'-O-methylmethyluridine
  modified_base 2: mod_base = OTHER; note = 2'-Fluoro-adenosine
  modified_base 3: mod_base = OTHER; note = 2'-Fluoro-guanosine
  modified_base 4: mod_base = OTHER; note = 2'-Fluoro-adenosine
  modified_base 5: mod_base = OTHER; note = 2'-Fluoro-guanosine
  modified_base 6: mod_base = OTHER; note = 2'-O-methyl-adenosine
  modified_base 7: mod_base = OTHER; note = 2'-Fluoro-uridine
  modified_base 8: mod_base = gm
  modified_base 9: mod_base = OTHER; note = 2'-O-methyl-adenosine
  modified_base 10: mod_base = OTHER; note = 2'-Fluoro-adenosine
  modified_base 11: mod_base = um
  modified_base 12: mod_base = um
  modified_base 13: mod_base = cm
  modified_base 14: mod_base = OTHER; note = 2'-Fluoro-uridine
  modified_base 15: mod_base = gm
  modified_base 16: mod_base = cm
  modified_base 17: mod_base = gm
  modified_base 18: mod_base = cm
  modified_base 19: mod_base = cm
  misc_feature 20..22: note = linked via phosphorothioate
  modified_base 20: mod_base = um
  modified_base 21: mod_base = gm
  modified_base 22: mod_base = gm
  source 1..22: mol_type = other RNA
tagagatgaattctgcgcctgg

SEQ ID NO: 175 - RNA, 22 nt, synthetic construct
  misc_feature 1..4: note = linked via phosphorothioate
  modified_base 1: mod_base = OTHER; note = 4'-O-monomethylphosphonate-2'-O-methylmethyluridine
  modified_base 2: mod_base = OTHER; note = 2'-Fluoro-adenosine
  modified_base 3: mod_base = OTHER; note = 2'-Fluoro-guanosine
  modified_base 4: mod_base = OTHER; note = 2'-Fluoro-adenosine
  modified_base 5: mod_base = OTHER; note = 2'-Fluoro-guanosine
  modified_base 6: mod_base = OTHER; note = 2'-O-methyl-adenosine
  modified_base 7: mod_base = OTHER; note = 2'-Fluoro-uridine
  modified_base 8: mod_base = gm
  modified_base 9: mod_base = OTHER; note = 2'-O-methyl-adenosine
  modified_base 10: mod_base = OTHER; note = 2'-Fluoro-adenosine
  modified_base 11: mod_base = um
  modified_base 12: mod_base = um
  modified_base 13: mod_base = cm
  modified_base 14: mod_base = OTHER; note = 2'-Fluoro-uridine
  modified_base 15: mod_base = gm
  modified_base 16: mod_base = cm
  modified_base 17: mod_base = gm
  modified_base 18: mod_base = cm
  modified_base 19: mod_base = cm
  misc_feature 20..22: note = linked via phosphorothioate
  modified_base 20: mod_base = um
  modified_base 21: mod_base = gm
  modified_base 22: mod_base = gm
  source 1..22: mol_type = other RNA
tagagatgaattctgcgcctgg

SEQ ID NO: 176 - RNA, 22 nt, synthetic construct
  misc_feature 1..4: note = linked via phosphorothioate
  modified_base 1: mod_base = OTHER; note = 4'-O-monomethylphosphonate-2'-O-methylmethyluridine
  modified_base 2: mod_base = OTHER; note = 2'-Fluoro-adenosine
  modified_base 3: mod_base = OTHER; note = 2'-Fluoro-guanosine
  modified_base 4: mod_base = OTHER; note = 2'-Fluoro-adenosine
  modified_base 5: mod_base = OTHER; note = 2'-Fluoro-guanosine
  modified_base 6: mod_base = OTHER; note = 2'-O-methyl-adenosine
  modified_base 7: mod_base = OTHER; note = 2'-Fluoro-uridine
  modified_base 8: mod_base = gm
  modified_base 9: mod_base = OTHER; note = 2'-O-methyl-adenosine
  modified_base 10: mod_base = OTHER; note = 2'-Fluoro-adenosine
  modified_base 11: mod_base = um
  modified_base 12: mod_base = um
  modified_base 13: mod_base = cm
  modified_base 14: mod_base = OTHER; note = 2'-Fluoro-uridine
  modified_base 15: mod_base = gm
  modified_base 16: mod_base = cm
  modified_base 17: mod_base = gm
  modified_base 18: mod_base = cm
  modified_base 19: mod_base = cm
  misc_feature 20..22: note = linked via phosphorothioate
  modified_base 20: mod_base = um
  modified_base 21: mod_base = gm
  modified_base 22: mod_base = gm
  source 1..22: mol_type = other RNA
tagagatgaattctgcgcctgg

SEQ ID NO: 177 - RNA, 22 nt, synthetic construct
  misc_feature 1..4: note = linked via phosphorothioate
  modified_base 1: mod_base = OTHER; note = 4'-O-monomethylphosphonate-2'-O-methylmethyluridine
  modified_base 2: mod_base = OTHER; note = 2'-Fluoro-adenosine
  modified_base 3: mod_base = OTHER; note = 2'-Fluoro-guanosine
  modified_base 4: mod_base = OTHER; note = 2'-Fluoro-adenosine
  modified_base 5: mod_base = OTHER; note = 2'-Fluoro-guanosine
  modified_base 6: mod_base = OTHER; note = 2'-O-methyl-adenosine
  modified_base 7: mod_base = OTHER; note = 2'-Fluoro-uridine
  modified_base 8: mod_base = gm
  modified_base 9: mod_base = OTHER; note = 2'-O-methyl-adenosine
  modified_base 10: mod_base = OTHER; note = 2'-Fluoro-adenosine
  modified_base 11: mod_base = um
  modified_base 12: mod_base = um
  modified_base 13: mod_base = cm
  modified_base 14: mod_base = OTHER; note = 2'-Fluoro-uridine
  modified_base 15: mod_base = gm
  modified_base 16: mod_base = cm
  modified_base 17: mod_base = gm
  modified_base 18: mod_base = cm
  modified_base 19: mod_base = cm
  misc_feature 20..22: note = linked via phosphorothioate
  modified_base 20: mod_base = um
  modified_base 21: mod_base = gm
  modified_base 22: mod_base = gm
  source 1..22: mol_type = other RNA
tagagatgaattctgcgcctgg

SEQ ID NO: 178 - RNA, 22 nt, synthetic construct
  misc_feature 1..4: note = linked via phosphorothioate
  modified_base 1: mod_base = OTHER; note = 4'-O-monomethylphosphonate-2'-O-methylmethyluridine
  modified_base 2: mod_base = OTHER; note = 2'-Fluoro-adenosine
  modified_base 3: mod_base = OTHER; note = 2'-Fluoro-guanosine
  modified_base 4: mod_base = OTHER; note = 2'-Fluoro-adenosine
  modified_base 5: mod_base = OTHER; note = 2'-Fluoro-guanosine
  modified_base 6: mod_base = OTHER; note = 2'-O-methyl-adenosine
  modified_base 7: mod_base = OTHER; note = 2'-Fluoro-uridine
  modified_base 8: mod_base = gm
  modified_base 9: mod_base = OTHER; note = 2'-O-methyl-adenosine
  modified_base 10: mod_base = OTHER; note = 2'-Fluoro-adenosine
  modified_base 11: mod_base = um
  modified_base 12: mod_base = um
  modified_base 13: mod_base = cm
  modified_base 14: mod_base = OTHER; note = 2'-Fluoro-uridine
  modified_base 15: mod_base = gm
  modified_base 16: mod_base = cm
  modified_base 17: mod_base = gm
  modified_base 18: mod_base = cm
  modified_base 19: mod_base = cm
  misc_feature 20..22: note = linked via phosphorothioate
  modified_base 20: mod_base = um
  modified_base 21: mod_base = gm
  modified_base 22: mod_base = gm
  source 1..22: mol_type = other RNA
tagagatgaattctgcgcctgg

SEQ ID NO: 179 - RNA, 22 nt, synthetic construct
  misc_feature 1..4: note = linked via phosphorothioate
  modified_base 1: mod_base = OTHER; note = 4'-O-monomethylphosphonate-2'-O-methylmethyluridine
  modified_base 2: mod_base = OTHER; note = 2'-Fluoro-adenosine
  modified_base 3: mod_base = OTHER; note = 2'-Fluoro-guanosine
  modified_base 4: mod_base = OTHER; note = 2'-Fluoro-adenosine
  modified_base 5: mod_base = OTHER; note = 2'-Fluoro-guanosine
  modified_base 6: mod_base = OTHER; note = 2'-O-methyl-adenosine
  modified_base 7: mod_base = OTHER; note = 2'-Fluoro-uridine
  modified_base 8: mod_base = gm
  modified_base 9: mod_base = OTHER; note = 2'-O-methyl-adenosine
  modified_base 10: mod_base = OTHER; note = 2'-Fluoro-adenosine
  modified_base 11: mod_base = um
  modified_base 12: mod_base = um
  modified_base 13: mod_base = cm
  modified_base 14: mod_base = OTHER; note = 2'-Fluoro-uridine
  modified_base 15: mod_base = gm
  modified_base 16: mod_base = cm
  modified_base 17: mod_base = gm
  modified_base 18: mod_base = cm
  modified_base 19: mod_base = cm
  misc_feature 20..22: note = linked via phosphorothioate
  modified_base 20: mod_base = um
  modified_base 21: mod_base = gm
  modified_base 22: mod_base = gm
  source 1..22: mol_type = other RNA
tagagatgaattctgcgcctgg

SEQ ID NO: 180 - RNA, 22 nt, synthetic construct
  misc_feature 1..4: note = linked via phosphorothioate
  modified_base 1: mod_base = OTHER; note = 4'-O-monomethylphosphonate-2'-O-methylmethyluridine
  modified_base 2: mod_base = OTHER; note = 2'-Fluoro-adenosine
  modified_base 3: mod_base = OTHER; note = 2'-Fluoro-guanosine
  modified_base 4: mod_base = OTHER; note = 2'-Fluoro-adenosine
  modified_base 5: mod_base = OTHER; note = 2'-Fluoro-guanosine
  modified_base 6: mod_base = OTHER; note = 2'-O-methyl-adenosine
  modified_base 7: mod_base = OTHER; note = 2'-Fluoro-uridine
  modified_base 8: mod_base = gm
  modified_base 9: mod_base = OTHER; note = 2'-O-methyl-adenosine
  modified_base 10: mod_base = OTHER; note = 2'-Fluoro-adenosine
  modified_base 11: mod_base = um
  modified_base 12: mod_base = um
  modified_base 13: mod_base = cm
  modified_base 14: mod_base = OTHER; note = 2'-Fluoro-uridine
  modified_base 15: mod_base = gm
  modified_base 16: mod_base = cm
  modified_base 17: mod_base = gm
  modified_base 18: mod_base = cm
  modified_base 19: mod_base = cm
  misc_feature 20..22: note = linked via phosphorothioate
  modified_base 20: mod_base = um
  modified_base 21: mod_base = gm
  modified_base 22: mod_base = gm
  source 1..22: mol_type = other RNA
tagagatgaattctgcgcctgg

SEQ ID NO: 181 - RNA, 22 nt, synthetic construct
  misc_feature 1..4: note = linked via phosphorothioate
  modified_base 1: mod_base = OTHER; note = 4'-O-monomethylphosphonate-2'-O-methylmethyluridine
  modified_base 2: mod_base = OTHER; note = 2'-Fluoro-adenosine
  modified_base 3: mod_base = OTHER; note = 2'-Fluoro-guanosine
  modified_base 4: mod_base = OTHER; note = 2'-Fluoro-adenosine
  modified_base 5: mod_base = OTHER; note = 2'-Fluoro-guanosine
  modified_base 6: mod_base = OTHER; note = 2'-O-methyl-adenosine
  modified_base 7: mod_base = OTHER; note = 2'-Fluoro-uridine
  modified_base 8: mod_base = gm
  modified_base 9: mod_base = OTHER; note = 2'-O-methyl-adenosine
  modified_base 10: mod_base = OTHER; note = 2'-Fluoro-adenosine
  modified_base 11: mod_base = um
  modified_base 12: mod_base = um
  modified_base 13: mod_base = cm
  modified_base 14: mod_base = OTHER; note = 2'-Fluoro-uridine
  modified_base 15: mod_base = gm
  modified_base 16: mod_base = cm
  modified_base 17: mod_base = gm
  modified_base 18: mod_base = cm
  modified_base 19: mod_base = cm
  misc_feature 20..22: note = linked via phosphorothioate
  modified_base 20: mod_base = um
  modified_base 21: mod_base = gm
  modified_base 22: mod_base = gm
  source 1..22: mol_type = other RNA
tagagatgaattctgcgcctgg

SEQ ID NO: 182 - RNA, 22 nt, synthetic construct
  misc_feature 1..4: note = linked via phosphorothioate
  modified_base 1: mod_base = OTHER; note = 4'-O-monomethylphosphonate-2'-O-methylmethyluridine
  modified_base 2: mod_base = OTHER; note = 2'-Fluoro-adenosine
  modified_base 3: mod_base = OTHER; note = 2'-Fluoro-guanosine
  modified_base 4: mod_base = OTHER; note = 2'-Fluoro-adenosine
  modified_base 5: mod_base = OTHER; note = 2'-Fluoro-guanosine
  modified_base 6: mod_base = OTHER; note = 2'-O-methyl-adenosine
  modified_base 7: mod_base = OTHER; note = 2'-Fluoro-uridine
  modified_base 8: mod_base = gm
  modified_base 9: mod_base = OTHER; note = 2'-O-methyl-adenosine
  modified_base 10: mod_base = OTHER; note = 2'-Fluoro-adenosine
  modified_base 11: mod_base = um
  modified_base 12: mod_base = um
  modified_base 13: mod_base = cm
  modified_base 14: mod_base = OTHER; note = 2'-Fluoro-uridine
  modified_base 15: mod_base = gm
  modified_base 16: mod_base = cm
  modified_base 17: mod_base = gm
  modified_base 18: mod_base = cm
  modified_base 19: mod_base = cm
  misc_feature 20..22: note = linked via phosphorothioate
  modified_base 20: mod_base = um
  modified_base 21: mod_base = gm
  modified_base 22: mod_base = gm
  source 1..22: mol_type = other RNA
tagagatgaattctgcgcctgg

SEQ ID NO: 183 - RNA, 22 nt, synthetic construct
  misc_feature 1..4: note = linked via phosphorothioate
  modified_base 1: mod_base = OTHER; note = 4'-O-monomethylphosphonate-2'-O-methylmethyluridine
  modified_base 2: mod_base = OTHER; note = 2'-Fluoro-adenosine
  modified_base 3: mod_base = OTHER; note = 2'-Fluoro-guanosine
  modified_base 4: mod_base = OTHER; note = 2'-Fluoro-adenosine
  modified_base 5: mod_base = OTHER; note = 2'-Fluoro-guanosine
  modified_base 6: mod_base = OTHER; note = 2'-O-methyl-adenosine
  modified_base 7: mod_base = OTHER; note = 2'-Fluoro-uridine
  modified_base 8: mod_base = gm
  modified_base 9: mod_base = OTHER; note = 2'-O-methyl-adenosine
  modified_base 10: mod_base = OTHER; note = 2'-Fluoro-adenosine
  modified_base 11: mod_base = um
  modified_base 12: mod_base = um
  modified_base 13: mod_base = cm
  modified_base 14: mod_base = OTHER; note = 2'-Fluoro-uridine
  modified_base 15: mod_base = gm
  modified_base 16: mod_base = cm
  modified_base 17: mod_base = gm
  modified_base 18: mod_base = cm
  modified_base 19: mod_base = cm
  misc_feature 20..22: note = linked via phosphorothioate
  modified_base 20: mod_base = um
  modified_base 21: mod_base = gm
  modified_base 22: mod_base = gm
  source 1..22: mol_type = other RNA
tagagatgaattctgcgcctgg

SEQ ID NO: 184 - RNA, 22 nt, synthetic construct
  misc_feature 1..4: note = linked via phosphorothioate
  modified_base 1: mod_base = OTHER; note = 4'-O-monomethylphosphonate-2'-O-methylmethyluridine
  modified_base 2: mod_base = OTHER; note = 2'-Fluoro-adenosine
  modified_base 3: mod_base = OTHER; note = 2'-Fluoro-guanosine
  modified_base 4: mod_base = OTHER; note = 2'-Fluoro-adenosine
  modified_base 5: mod_base = OTHER; note = 2'-Fluoro-guanosine
  modified_base 6: mod_base = OTHER; note = 2'-O-methyl-adenosine
  modified_base 7: mod_base = OTHER; note = 2'-Fluoro-uridine
  modified_base 8: mod_base = gm
  modified_base 9: mod_base = OTHER; note = 2'-O-methyl-adenosine
  modified_base 10: mod_base = OTHER; note = 2'-Fluoro-adenosine
  modified_base 11: mod_base = um
  modified_base 12: mod_base = um
  modified_base 13: mod_base = cm
  modified_base 14: mod_base = OTHER; note = 2'-Fluoro-uridine
  modified_base 15: mod_base = gm
  modified_base 16: mod_base = cm
  modified_base 17: mod_base = gm
  modified_base 18: mod_base = cm
  modified_base 19: mod_base = cm
  misc_feature 20..22: note = linked via phosphorothioate
  modified_base 20: mod_base = um
  modified_base 21: mod_base = gm
  modified_base 22: mod_base = gm
  source 1..22: mol_type = other RNA
tagagatgaattctgcgcctgg

SEQ ID NO: 185 - RNA, 22 nt, synthetic construct
  misc_feature 1..4: note = linked via phosphorothioate
  modified_base 1: mod_base = OTHER; note = 4'-O-monomethylphosphonate-2'-O-methylmethyluridine
  modified_base 2: mod_base = OTHER; note = 2'-Fluoro-adenosine
  modified_base 3: mod_base = OTHER; note = 2'-Fluoro-guanosine
  modified_base 4: mod_base = OTHER; note = 2'-Fluoro-adenosine
  modified_base 5: mod_base = OTHER; note = 2'-Fluoro-guanosine
  modified_base 6: mod_base = OTHER; note = 2'-O-methyl-adenosine
  modified_base 7: mod_base = OTHER; note = 2'-Fluoro-uridine
  modified_base 8: mod_base = gm
  modified_base 9: mod_base = OTHER; note = 2'-O-methyl-adenosine
  modified_base 10: mod_base = OTHER; note = 2'-Fluoro-adenosine
  modified_base 11: mod_base = um
  modified_base 12: mod_base = um
  misc_feature 13..15: note = linked via phosphorothioate
  modified_base 13: mod_base = cm
  modified_base 14: mod_base = OTHER; note = 2'-Fluoro-uridine
  modified_base 15: mod_base = gm
  modified_base 16: mod_base = cm
  modified_base 17: mod_base = gm
  modified_base 18: mod_base = cm
  modified_base 19: mod_base = cm
  misc_feature 20..22: note = linked via phosphorothioate
  modified_base 20: mod_base = um
  modified_base 21: mod_base = gm
  modified_base 22: mod_base = gm
  source 1..22: mol_type = other RNA
tagagatgaattctgcgcctgg

SEQ ID NO: 186 - RNA, 22 nt, synthetic construct
  misc_feature 1..4: note = linked via phosphorothioate
  modified_base 1: mod_base = OTHER; note = 4'-O-monomethylphosphonate-2'-O-methylmethyluridine
  modified_base 2: mod_base = OTHER; note = 2'-Fluoro-adenosine
  modified_base 3: mod_base = OTHER; note = 2'-Fluoro-guanosine
  modified_base 4: mod_base = OTHER; note = 2'-Fluoro-adenosine
  modified_base 5: mod_base = OTHER; note = 2'-Fluoro-guanosine
  modified_base 6: mod_base = OTHER; note = 2'-O-methyl-adenosine
  modified_base 7: mod_base = OTHER; note = 2'-Fluoro-uridine
  modified_base 8: mod_base = gm
  modified_base 9: mod_base = OTHER; note = 2'-O-methyl-adenosine
  modified_base 10: mod_base = OTHER; note = 2'-Fluoro-adenosine
  modified_base 11: mod_base = um
  modified_base 12: mod_base = um
  misc_feature 13..15: note = linked via phosphorothioate
  modified_base 13: mod_base = cm
  modified_base 14: mod_base = OTHER; note = 2'-Fluoro-uridine
  modified_base 15: mod_base = gm
  modified_base 16: mod_base = cm
  modified_base 17: mod_base = gm
  modified_base 18: mod_base = cm
  modified_base 19: mod_base = cm
  misc_feature 20..22: note = linked via phosphorothioate
  modified_base 20: mod_base = um
  modified_base 21: mod_base = gm
  modified_base 22: mod_base = gm
  source 1..22: mol_type = other RNA
tagagatgaattctgcgcctgg

SEQ ID NO: 187 - RNA, 22 nt, synthetic construct
  misc_feature 1..4: note = linked via phosphorothioate
  modified_base 1: mod_base = OTHER; note = 4'-O-monomethylphosphonate-2'-O-methylmethyluridine
  modified_base 2: mod_base = OTHER; note = 2'-Fluoro-adenosine
  modified_base 3: mod_base = OTHER; note = 2'-Fluoro-guanosine
  modified_base 4: mod_base = OTHER; note = 2'-Fluoro-adenosine
  modified_base 5: mod_base = OTHER; note = 2'-Fluoro-guanosine
  modified_base 6: mod_base = OTHER; note = 2'-O-methyl-adenosine
  modified_base 7: mod_base = OTHER; note = 2'-Fluoro-uridine
  modified_base 8: mod_base = gm
  modified_base 9: mod_base = OTHER; note = 2'-O-methyl-adenosine
  modified_base 10: mod_base = OTHER; note = 2'-Fluoro-adenosine
  modified_base 11: mod_base = um
  modified_base 12: mod_base = um
  misc_feature 13..15: note = linked via phosphorothioate
  modified_base 13: mod_base = cm
  modified_base 14: mod_base = OTHER; note = 2'-Fluoro-uridine
  modified_base 15: mod_base = gm
  modified_base 16: mod_base = cm
  modified_base 17: mod_base = gm
  modified_base 18: mod_base = cm
  modified_base 19: mod_base = cm
  misc_feature 20..22: note = linked via phosphorothioate
  modified_base 20: mod_base = um
  modified_base 21: mod_base = gm
  modified_base 22: mod_base = gm
  source 1..22: mol_type = other RNA
tagagatgaattctgcgcctgg

SEQ ID NO: 188 - RNA, 22 nt, synthetic construct
  misc_feature 1..4: note = linked via phosphorothioate
  modified_base 1: mod_base = OTHER; note = 4'-O-monomethylphosphonate-2'-O-methylmethyluridine
  modified_base 2: mod_base = OTHER; note = 2'-Fluoro-adenosine
  modified_base 3: mod_base = OTHER; note = 2'-Fluoro-guanosine
  modified_base 4: mod_base = OTHER; note = 2'-Fluoro-adenosine
  modified_base 5: mod_base = OTHER; note = 2'-Fluoro-guanosine
  modified_base 6: mod_base = OTHER; note = 2'-O-methyl-adenosine
  modified_base 7: mod_base = OTHER; note = 2'-Fluoro-uridine
  modified_base 8: mod_base = gm
  modified_base 9: mod_base = OTHER; note = 2'-O-methyl-adenosine
  modified_base 10: mod_base = OTHER; note = 2'-Fluoro-adenosine
  modified_base 11: mod_base = um
  modified_base 12: mod_base = um
  modified_base 13: mod_base = cm
  modified_base 14: mod_base = OTHER; note = 2'-Fluoro-uridine
  modified_base 15: mod_base = gm
  modified_base 16: mod_base = cm
  modified_base 17: mod_base = gm
  modified_base 18: mod_base = cm
  modified_base 19: mod_base = cm
  misc_feature 20..22: note = linked via phosphorothioate
  modified_base 20: mod_base = um
  modified_base 21: mod_base = gm
  modified_base 22: mod_base = gm
  source 1..22: mol_type = other RNA
tagagatgaattctgcgcctgg

SEQ ID NO: 189 - RNA, 22 nt, synthetic construct
  misc_feature 1..4: note = linked via phosphorothioate
  modified_base 1: mod_base = OTHER; note = 4'-O-monomethylphosphonate-2'-O-methylmethyluridine
  modified_base 2: mod_base = OTHER; note = 2'-Fluoro-adenosine
  modified_base 3: mod_base = OTHER; note = 2'-Fluoro-guanosine
  modified_base 4: mod_base = OTHER; note = 2'-Fluoro-adenosine
  modified_base 5: mod_base = OTHER; note = 2'-Fluoro-guanosine
  modified_base 6: mod_base = OTHER; note = 2'-O-methyl-adenosine
  modified_base 7: mod_base = OTHER; note = 2'-Fluoro-uridine
  modified_base 8: mod_base = gm
  modified_base 9: mod_base = OTHER; note = 2'-O-methyl-adenosine
  modified_base 10: mod_base = OTHER; note = 2'-Fluoro-adenosine
  modified_base 11: mod_base = um
  modified_base 12: mod_base = um
  modified_base 13: mod_base = cm
  modified_base 14: mod_base = OTHER; note = 2'-Fluoro-uridine
  modified_base 15: mod_base = gm
  modified_base 16: mod_base = cm
  modified_base 17: mod_base = gm
  modified_base 18: mod_base = cm
  modified_base 19: mod_base = OTHER; note = 2'-Fluoro-cytidine
  misc_feature 20..22: note = linked via phosphorothioate
  modified_base 20: mod_base = um
  modified_base 21: mod_base = gm
  modified_base 22: mod_base = gm
  source 1..22: mol_type = other RNA
tagagatgaattctgcgcctgg

SEQ ID NO: 190 - RNA, 22 nt, synthetic construct
  misc_feature 1..4: note = linked via phosphorothioate
  modified_base 1: mod_base = OTHER; note = 4'-O-monomethylphosphonate-2'-O-methylmethyluridine
  modified_base 2: mod_base = OTHER; note = 2'-Fluoro-adenosine
  modified_base 3: mod_base = OTHER; note = 2'-Fluoro-guanosine
  modified_base 4: mod_base = OTHER; note = 2'-Fluoro-adenosine
  modified_base 5: mod_base = OTHER; note = 2'-Fluoro-guanosine
  modified_base 6: mod_base = OTHER; note = 2'-O-methyl-adenosine
  modified_base 7: mod_base = OTHER; note = 2'-Fluoro-uridine
  modified_base 8: mod_base = gm
  modified_base 9: mod_base = OTHER; note = 2'-O-methyl-adenosine
  modified_base 10: mod_base = OTHER; note = 2'-Fluoro-adenosine
  modified_base 11: mod_base = um
  modified_base 12: mod_base = um
  modified_base 13: mod_base = cm
  modified_base 14: mod_base = OTHER; note = 2'-Fluoro-uridine
  modified_base 15: mod_base = gm
  modified_base 16: mod_base = cm
  modified_base 17: mod_base = gm
  modified_base 18: mod_base = cm
  modified_base 19: mod_base = cm
  misc_feature 20..22: note = linked via phosphorothioate
  modified_base 20: mod_base = um
  modified_base 21: mod_base = gm
  modified_base 22: mod_base = gm
  source 1..22: mol_type = other RNA
tagagatgaattctgcgcctgg

SEQ ID NO: 191 - RNA, 22 nt, synthetic construct
  misc_feature 1..4: note = linked via phosphorothioate
  modified_base 1: mod_base = OTHER; note = 4'-O-monomethylphosphonate-2'-O-methylmethyluridine
  modified_base 2: mod_base = OTHER; note = 2'-Fluoro-adenosine
  modified_base 3: mod_base = OTHER; note = 2'-Fluoro-guanosine
  modified_base 4: mod_base = OTHER; note = 2'-Fluoro-adenosine
  modified_base 5: mod_base = OTHER; note = 2'-Fluoro-guanosine
  modified_base 6: mod_base = OTHER; note = 2'-O-methyl-adenosine
  modified_base 7: mod_base = OTHER; note = 2'-Fluoro-uridine
  modified_base 8: mod_base = gm
  modified_base 9: mod_base = OTHER; note = 2'-O-methyl-adenosine
  modified_base 10: mod_base = OTHER; note = 2'-Fluoro-adenosine
  modified_base 11: mod_base = um
  modified_base 12: mod_base = um
  modified_base 13: mod_base = cm
  modified_base 14: mod_base = OTHER; note = 2'-Fluoro-uridine
  modified_base 15: mod_base = gm
  modified_base 16: mod_base = cm
  modified_base 17: mod_base = gm
  modified_base 18: mod_base = cm
  misc_feature 19..22: note = linked via phosphorothioate
  modified_base 19: mod_base = OTHER; note = 2'-Fluoro-cytidine
  modified_base 20: mod_base = um
  modified_base 21: mod_base = gm
  modified_base 22: mod_base = gm
  source 1..22: mol_type = other RNA
tagagatgaattctgcgcctgg

SEQ ID NO: 192 - RNA, 22 nt, synthetic construct
  misc_feature 1..4: note = linked via phosphorothioate
  modified_base 1: mod_base = OTHER; note = 4'-O-monomethylphosphonate-2'-O-methylmethyluridine
  modified_base 2: mod_base = OTHER; note = 2'-Fluoro-adenosine
  modified_base 3: mod_base = OTHER; note = 2'-Fluoro-guanosine
  modified_base 4: mod_base = OTHER; note = 2'-Fluoro-adenosine
  modified_base 5: mod_base = OTHER; note = 2'-Fluoro-guanosine
  modified_base 6: mod_base = OTHER; note = 2'-O-methyl-adenosine
  modified_base 7: mod_base = OTHER; note = 2'-Fluoro-uridine
  modified_base 8: mod_base = gm
  modified_base 9: mod_base = OTHER; note = 2'-O-methyl-adenosine
  modified_base 10: mod_base = OTHER; note = 2'-Fluoro-adenosine
  modified_base 11: mod_base = um
  modified_base 12: mod_base = um
  modified_base 13: mod_base = cm
  modified_base 14: mod_base = OTHER; note = 2'-Fluoro-uridine
  modified_base 15: mod_base = gm
  modified_base 16: mod_base = cm
  modified_base 17: mod_base = gm
  misc_feature 18..19: note = linked via phosphorothioate
  modified_base 18: mod_base = cm
  modified_base 19: mod_base = OTHER; note = 2'-Fluoro-cytidine
  misc_feature 20..22: note = linked via phosphorothioate
  modified_base 20: mod_base = um
  modified_base 21: mod_base = gm
  modified_base 22: mod_base = gm
  source 1..22: mol_type = other RNA
tagagatgaattctgcgcctgg

SEQ ID NO: 193 - RNA, 23 nt, synthetic construct
  source 1..23: mol_type = other RNA
tgaaactcagtttagccgaaggc

SEQ ID NO: 194 - DNA, 23 bp, synthetic construct
  misc_feature 1: note = DNA fragment
  misc_feature 2..23: note = RNA fragment
  source 1..23: mol_type = other DNA
tgaaactcagtttagccgaaggc

SEQ ID NO: 195 - DNA, 23 bp, synthetic construct
  misc_feature 1: note = DNA fragment
  misc_feature 2..23: note = RNA fragment
  source 1..23: mol_type = other DNA
tgaaactcagtttagccgaaggc

SEQ ID NO: 196 - DNA, 23 bp, synthetic construct
  misc_feature 1: note = DNA fragment
  misc_feature 2..23: note = RNA fragment
  source 1..23: mol_type = other DNA
tgaaactcagtttagccgaaggc

SEQ ID NO: 197 - RNA, 22 nt, synthetic construct
  source 1..22: mol_type = other RNA
gaaactcagtttagccgaaggc

SEQ ID NO: 198 - RNA, 22 nt, synthetic construct
  source 1..22: mol_type = other RNA
gaaactcagtttagccgaaggc

SEQ ID NO: 199 - RNA, 22 nt, synthetic construct
  source 1..22: mol_type = other RNA
gaaactcagtttagccgaaggc

SEQ ID NO: 200 - DNA, 22 bp, synthetic construct
  misc_feature 1..10: note = RNA fragment
  misc_feature 11..12: note = DNA fragment
  misc_feature 13..22: note = RNA fragment
  source 1..22: mol_type = other DNA
gaaactcagtttagccgaaggc

SEQ ID NO: 201 - RNA, 21 nt, synthetic construct
  source 1..21: mol_type = other RNA
aaactcagtttagccgaaggc

SEQ ID NO: 202 - RNA, 21 nt, synthetic construct
  source 1..21: mol_type = other RNA
aaactcagtttagccgaaggc

SEQ ID NO: 203 - RNA, 21 nt, synthetic construct
  source 1..21: mol_type = other RNA
aaactcagtttagccgaaggc

SEQ ID NO: 204 - DNA, 21 bp, synthetic construct
  misc_feature 1..10: note = RNA fragment
  misc_feature 11..12: note = DNA fragment
  misc_feature 13..21: note = RNA fragment
  source 1..21: mol_type = other DNA
aaactcagtttagccgaaggc

SEQ ID NO: 205 - RNA, 22 nt, synthetic construct
  source 1..22: mol_type = other RNA
taaactgagtttcatccaccgg

SEQ ID NO: 206 - RNA, 22 nt, synthetic construct
  source 1..22: mol_type = other RNA
taaactgagtttcatccaccgg

SEQ ID NO: 207 - RNA, 22 nt, synthetic construct
  source 1..22: mol_type = other RNA
taaactgagtttcatccaccgg

SEQ ID NO: 208 - RNA, 22 nt, synthetic construct
  source 1..22: mol_type = other RNA
taaactgagtttcatccaccgg

SEQ ID NO: 209 - RNA, 22 nt, synthetic construct
  source 1..22: mol_type = other RNA
taaactgagtttcatccaccgg

SEQ ID NO: 210 - RNA, 22 nt, synthetic construct
  source 1..22: mol_type = other RNA
taaactgagtttcatccaccgg

SEQ ID NO: 211 - RNA, 22 nt, synthetic construct
  source 1..22: mol_type = other RNA
taaactgagtttcatccaccgg

SEQ ID NO: 212 - RNA, 22 nt, synthetic construct
  source 1..22: mol_type = other RNA
taaactgagtttcatccaccgg

SEQ ID NO: 213 - RNA, 22 nt, synthetic construct
  source 1..22: mol_type = other RNA
taaactgagtttcatccaccgg

SEQ ID NO: 214 - RNA, 22 nt, synthetic construct
  source 1..22: mol_type = other RNA
taaactgagtttcatccaccgg

SEQ ID NO: 215 - RNA, 22 nt, synthetic construct
  source 1..22: mol_type = other RNA
taaactgagtttcatccaccgg

SEQ ID NO: 216 - RNA, 22 nt, synthetic construct
  source 1..22: mol_type = other RNA
taaactgagtttcatccaccgg

SEQ ID NO: 217 - RNA, 23 nt, synthetic construct
  misc_feature 1^2: note = linked via phosphorothioate
  modified_base 1: mod_base = um
  modified_base 2: mod_base = OTHER; note = 2'-Fluoro-guanosine
  modified_base 3: mod_base = OTHER; note = 2'-Fluoro-adenosine
  modified_base 4: mod_base = OTHER; note = 2'-Fluoro-adenosine
  modified_base 5: mod_base = OTHER; note = 2'-Fluoro-adenosine
  modified_base 6: mod_base = cm
  modified_base 7: mod_base = um
  modified_base 8: mod_base = cm
  modified_base 9: mod_base = OTHER; note = 2'-O-methyl-adenosine
  modified_base 10: mod_base = gm
  modified_base 11: mod_base = um
  modified_base 12: mod_base = um
  modified_base 13: mod_base = um
  modified_base 14: mod_base = OTHER; note = 2'-O-methyl-adenosine
  modified_base 15: mod_base = OTHER; note = 2'-O,4'-C-Methyleneguanosine
  modified_base 16: mod_base = OTHER; note = 2'-O,4'-C-Methylenecytidine
  modified_base 17: mod_base = OTHER; note = 2'-O,4'-C-Methylenecytidine
  modified_base 18: mod_base = gm
  modified_base 19: mod_base = OTHER; note = aminodiethoxymethanol-adenosine-N-acetylgalactosamine
  modified_base 20: mod_base = OTHER; note = aminodiethoxymethanol-adenosine-N-acetylgalactosamine
  modified_base 21: mod_base = OTHER; note = 2'-O,4'-C-Methyleneguanosine
  modified_base 22: mod_base = OTHER; note = 2'-O,4'-C-Methyleneguanosine
  modified_base 23: mod_base = OTHER; note = 2'-O,4'-C-Methylenecytidine
  source 1..23: mol_type = other RNA
tgaaactcagtttagccgaaggc

SEQ ID NO: 218 - DNA, 23 bp, synthetic construct
  misc_feature 1: note = DNA fragment
  misc_feature 2..23: note = RNA fragment
  misc_feature 1^2: note = linked via phosphorothioate
  modified_base 1: mod_base = OTHER; note = 2'-O,4'-C-Methylenethymine
  modified_base 2: mod_base = OTHER; note = 2'-Fluoro-guanosine
  modified_base 3: mod_base = OTHER; note = 2'-Fluoro-adenosine
  modified_base 4: mod_base = OTHER; note = 2'-Fluoro-adenosine
  modified_base 5: mod_base = OTHER; note = 2'-Fluoro-adenosine
  modified_base 6: mod_base = cm
  modified_base 7: mod_base = um
  modified_base 8: mod_base = cm
  modified_base 9: mod_base = OTHER; note = 2'-O,4'-C-Methyleneadenosine
  modified_base 10: mod_base = gm
  modified_base 11: mod_base = um
  modified_base 12: mod_base = um
  modified_base 13: mod_base = um
  modified_base 14: mod_base = OTHER; note = 2'-O-methyl-adenosine
  modified_base 15: mod_base = OTHER; note = 2'-O,4'-C-Methyleneguanosine
  modified_base 16: mod_base = OTHER; note = 2'-O,4'-C-Methylenecytidine
  modified_base 17: mod_base = OTHER; note = 2'-O,4'-C-Methylenecytidine
  modified_base 18: mod_base = gm
  modified_base 19: mod_base = OTHER; note = aminodiethoxymethanol-adenosine-N-acetylgalactosamine
  modified_base 20: mod_base = OTHER; note = aminodiethoxymethanol-adenosine-N-acetylgalactosamine
  modified_base 21: mod_base = OTHER; note = 2'-O,4'-C-Methyleneguanosine
  modified_base 22: mod_base = OTHER; note = 2'-O,4'-C-Methyleneguanosine
  modified_base 23: mod_base = OTHER; note = 2'-O,4'-C-Methylenecytidine
  source 1..23: mol_type = other DNA
tgaaactcagtttagccgaaggc

SEQ ID NO: 219 - DNA, 23 bp, synthetic construct
  misc_feature 1: note = DNA fragment
  misc_feature 2..23: note = RNA fragment
  misc_feature 1^2: note = linked via phosphorothioate
  modified_base 1: mod_base = OTHER; note = 2'-O,4'-C-Methylenethymine
  modified_base 2: mod_base = OTHER; note = 2'-Fluoro-guanosine
  modified_base 3: mod_base = OTHER; note = 2'-Fluoro-adenosine
  modified_base 4: mod_base = OTHER; note = 2'-Fluoro-adenosine
  modified_base 5: mod_base = OTHER; note = 2'-Fluoro-adenosine
  modified_base 6: mod_base = cm
  modified_base 7: mod_base = um
  modified_base 8: mod_base = cm
  modified_base 9: mod_base = OTHER; note = 2'-O,4'-C-Methyleneadenosine
  modified_base 10: mod_base = OTHER; note = 2'-O,4'-C-Methyleneguanosine
  modified_base 11: mod_base = um
  modified_base 12: mod_base = um
  modified_base 13: mod_base = um
  modified_base 14: mod_base = OTHER; note = 2'-O-methyl-adenosine
  modified_base 15: mod_base = OTHER; note = 2'-O,4'-C-Methyleneguanosine
  modified_base 16: mod_base = OTHER; note = 2'-O,4'-C-Methylenecytidine
  modified_base 17: mod_base = OTHER; note = 2'-O,4'-C-Methylenecytidine
  modified_base 18: mod_base = gm
  modified_base 19: mod_base = OTHER; note = aminodiethoxymethanol-adenosine-N-acetylgalactosamine
  modified_base 20: mod_base = OTHER; note = aminodiethoxymethanol-adenosine-N-acetylgalactosamine
  modified_base 21: mod_base = OTHER; note = 2'-O,4'-C-Methyleneguanosine
  modified_base 22: mod_base = OTHER; note = 2'-O,4'-C-Methyleneguanosine
  modified_base 23: mod_base = OTHER; note = 2'-O,4'-C-Methylenecytidine
  source 1..23: mol_type = other DNA
tgaaactcagtttagccgaaggc

SEQ ID NO: 220 - DNA, 23 bp, synthetic construct
  misc_feature 1: note = DNA fragment
  misc_feature 2..23: note = RNA fragment
  misc_feature 1^2: note = linked via phosphorothioate
  modified_base 1: mod_base = OTHER; note = 2'-O,4'-C-Methylenethymine
  modified_base 2: mod_base = OTHER; note = 2'-Fluoro-guanosine
  modified_base 3: mod_base = OTHER; note = 2'-Fluoro-adenosine
  modified_base 4: mod_base = OTHER; note = 2'-Fluoro-adenosine
  modified_base 5: mod_base = OTHER; note = 2'-Fluoro-adenosine
  modified_base 6: mod_base = cm
  modified_base 7: mod_base = um
  modified_base 8: mod_base = cm
  modified_base 9: mod_base = OTHER; note = 2'-O,4'-C-Methyleneadenosine
  modified_base 10: mod_base = OTHER; note = 2'-O,4'-C-Methyleneguanosine
  modified_base 11: mod_base = um
  modified_base 12: mod_base = OTHER; note = 2'-O,4'-C-Methylenethymine
  modified_base 13: mod_base = OTHER; note = 2'-O,4'-C-Methylenethymine
  modified_base 14: mod_base = OTHER; note = 2'-O-methyl-adenosine
  modified_base 15: mod_base = OTHER; note = 2'-O,4'-C-Methyleneguanosine
  modified_base 16: mod_base = OTHER; note = 2'-O,4'-C-Methylenecytidine
  modified_base 17: mod_base = OTHER; note = 2'-O,4'-C-Methylenecytidine
  modified_base 18: mod_base = gm
  modified_base 19: mod_base = OTHER; note = aminodiethoxymethanol-adenosine-N-acetylgalactosamine
  modified_base 20: mod_base = OTHER; note = aminodiethoxymethanol-adenosine-N-acetylgalactosamine
  modified_base 21: mod_base = OTHER; note = 2'-O,4'-C-Methyleneguanosine
  modified_base 22: mod_base = OTHER; note = 2'-O,4'-C-Methyleneguanosine
  modified_base 23: mod_base = OTHER; note = 2'-O,4'-C-Methylenecytidine
  source 1..23: mol_type = other DNA
tgaaactcagtttagccgaaggc

SEQ ID NO: 221 - RNA, 22 nt, synthetic construct
  misc_feature 1^2: note = linked via phosphorothioate
  modified_base 1: mod_base = OTHER; note = 2'-Fluoro-guanosine
  modified_base 2: mod_base = OTHER; note = 2'-Fluoro-adenosine
  modified_base 3: mod_base = OTHER; note = 2'-Fluoro-adenosine
  modified_base 4: mod_base = OTHER; note = 2'-Fluoro-adenosine
  modified_base 5: mod_base = cm
  modified_base 6: mod_base = um
  modified_base 7: mod_base = cm
  modified_base 8: mod_base = OTHER; note = 2'-O-methyl-adenosine
  modified_base 9: mod_base = gm
  modified_base 10: mod_base = um
  modified_base 11: mod_base = um
  modified_base 12: mod_base = um
  modified_base 13: mod_base = OTHER; note = 2'-O-methyl-adenosine
  modified_base 14: mod_base = OTHER; note = 2'-O,4'-C-Methyleneguanosine
  modified_base 15: mod_base = OTHER; note = 2'-O,4'-C-Methylenecytidine
  modified_base 16: mod_base = OTHER; note = 2'-O,4'-C-Methylenecytidine
  modified_base 17: mod_base = gm
  modified_base 18: mod_base = OTHER; note = aminodiethoxymethanol-adenosine-N-acetylgalactosamine
  modified_base 19: mod_base = OTHER; note = aminodiethoxymethanol-adenosine-N-acetylgalactosamine
  modified_base 20: mod_base = OTHER; note = 2'-O,4'-C-Methyleneguanosine
  modified_base 21: mod_base = OTHER; note = 2'-O,4'-C-Methyleneguanosine
  modified_base 22: mod_base = OTHER; note = 2'-O,4'-C-Methylenecytidine
  source 1..22: mol_type = other RNA
gaaactcagtttagccgaaggc

SEQ ID NO: 222 - RNA, 22 nt, synthetic construct
  misc_feature 1^2: note = linked via phosphorothioate
  modified_base 1: mod_base = OTHER; note = 2'-O,4'-C-Methyleneguanosine
  modified_base 2: mod_base = OTHER; note = 2'-Fluoro-adenosine
  modified_base 3: mod_base = OTHER; note = 2'-Fluoro-adenosine
  modified_base 4: mod_base = OTHER; note = 2'-Fluoro-adenosine
  modified_base 5: mod_base = cm
  modified_base 6: mod_base = um
  modified_base 7: mod_base = cm
  modified_base 8: mod_base = OTHER; note = 2'-O,4'-C-Methyleneadenosine
  modified_base 9: mod_base = gm
  modified_base 10: mod_base = um
  modified_base 11: mod_base = um
  modified_base 12: mod_base = um
  modified_base 13: mod_base = OTHER; note = 2'-O-methyl-adenosine
  modified_base 14: mod_base = OTHER; note = 2'-O,4'-C-Methyleneguanosine
  modified_base 15: mod_base = OTHER; note = 2'-O,4'-C-Methylenecytidine
  modified_base 16: mod_base = OTHER; note = 2'-O,4'-C-Methylenecytidine
  modified_base 17: mod_base = gm
  modified_base 18: mod_base = OTHER; note = aminodiethoxymethanol-adenosine-N-acetylgalactosamine
  modified_base 19: mod_base = OTHER; note = aminodiethoxymethanol-adenosine-N-acetylgalactosamine
  modified_base 20: mod_base = OTHER; note = 2'-O,4'-C-Methyleneguanosine
  modified_base 21: mod_base = OTHER; note = 2'-O,4'-C-Methyleneguanosine
  modified_base 22: mod_base = OTHER; note = 2'-O,4'-C-Methylenecytidine
  source 1..22: mol_type = other RNA
gaaactcagtttagccgaaggc

SEQ ID NO: 223 - RNA, 22 nt, synthetic construct
  misc_feature 1^2: note = linked via phosphorothioate
  modified_base 1: mod_base = OTHER; note = 2'-O,4'-C-Methyleneguanosine
  modified_base 2: mod_base = OTHER; note = 2'-Fluoro-adenosine
  modified_base 3: mod_base = OTHER; note = 2'-Fluoro-adenosine
  modified_base 4: mod_base = OTHER; note = 2'-Fluoro-adenosine
  modified_base 5: mod_base = cm
  modified_base 6: mod_base = um
  modified_base 7: mod_base = cm
  modified_base 8: mod_base = OTHER; note = 2'-O,4'-C-Methyleneadenosine
  modified_base 9: mod_base = OTHER; note = 2'-O,4'-C-Methyleneguanosine
  modified_base 10: mod_base = um
  modified_base 11: mod_base = um
  modified_base 12: mod_base = um
  modified_base 13: mod_base = OTHER; note = 2'-O-methyl-adenosine
  modified_base 14: mod_base = OTHER; note = 2'-O,4'-C-Methyleneguanosine
  modified_base 15: mod_base = OTHER; note = 2'-O,4'-C-Methylenecytidine
  modified_base 16: mod_base = OTHER; note = 2'-O,4'-C-Methylenecytidine
  modified_base 17: mod_base = gm
  modified_base 18: mod_base = OTHER; note = aminodiethoxymethanol-adenosine-N-acetylgalactosamine
  modified_base 19: mod_base = OTHER; note = aminodiethoxymethanol-adenosine-N-acetylgalactosamine
  modified_base 20: mod_base = OTHER; note = 2'-O,4'-C-Methyleneguanosine
  modified_base 21: mod_base = OTHER; note = 2'-O,4'-C-Methyleneguanosine
  modified_base 22: mod_base = OTHER; note = 2'-O,4'-C-Methylenecytidine
  source 1..22: mol_type = other RNA
gaaactcagtttagccgaaggc

SEQ ID NO: 224 - DNA, 22 bp, synthetic construct
  misc_feature 1..10: note = RNA fragment
  misc_feature 11..12: note = DNA fragment
  misc_feature 13..22: note = RNA fragment
  misc_feature 1^2: note = linked via phosphorothioate
  modified_base 1: mod_base = OTHER; note = 2'-O,4'-C-Methyleneguanosine
  modified_base 2: mod_base = OTHER; note = 2'-Fluoro-adenosine
  modified_base 3: mod_base = OTHER; note = 2'-Fluoro-adenosine
  modified_base 4: mod_base = OTHER; note = 2'-Fluoro-adenosine
  modified_base 5: mod_base = cm
  modified_base 6: mod_base = um
  modified_base 7: mod_base = cm
  modified_base 8: mod_base = OTHER; note = 2'-O,4'-C-Methyleneadenosine
  modified_base 9: mod_base = OTHER; note = 2'-O,4'-C-Methyleneguanosine
  modified_base 10: mod_base = um
  modified_base 11: mod_base = OTHER; note = 2'-O,4'-C-Methylenethymine
  modified_base 12: mod_base = OTHER; note = 2'-O,4'-C-Methylenethymine
  modified_base 13: mod_base = OTHER; note = 2'-O-methyl-adenosine
  modified_base 14: mod_base = OTHER; note = 2'-O,4'-C-Methyleneguanosine
  modified_base 15: mod_base = OTHER; note = 2'-O,4'-C-Methylenecytidine
  modified_base 16: mod_base = OTHER; note = 2'-O,4'-C-Methylenecytidine
  modified_base 17: mod_base = gm
  modified_base 18: mod_base = OTHER; note = aminodiethoxymethanol-adenosine-N-acetylgalactosamine
  modified_base 19: mod_base = OTHER; note = aminodiethoxymethanol-adenosine-N-acetylgalactosamine
  modified_base 20: mod_base = OTHER; note = 2'-O,4'-C-Methyleneguanosine
  modified_base 21: mod_base = OTHER; note = 2'-O,4'-C-Methyleneguanosine
  modified_base 22: mod_base = OTHER; note = 2'-O,4'-C-Methylenecytidine
  source 1..22: mol_type = other DNA
gaaactcagtttagccgaaggc

SEQ ID NO: 225 - RNA, 21 nt, synthetic construct
  misc_feature 1^2: note = linked via phosphorothioate
  modified_base 1: mod_base = OTHER; note = 2'-Fluoro-adenosine
  modified_base 2: mod_base = OTHER; note = 2'-Fluoro-adenosine
  modified_base 3: mod_base = OTHER; note = 2'-Fluoro-adenosine
  modified_base 4: mod_base = cm
  modified_base 5: mod_base = um
  modified_base 6: mod_base = cm
  modified_base 7: mod_base = OTHER; note = 2'-O-methyl-adenosine
  modified_base 8: mod_base = gm
  modified_base 9: mod_base = um
  modified_base 10: mod_base = um
  modified_base 11: mod_base = um
  modified_base 12: mod_base = OTHER; note = 2'-O-methyl-adenosine
  modified_base 13: mod_base = OTHER; note = 2'-O,4'-C-Methyleneguanosine
  modified_base 14: mod_base = OTHER; note = 2'-O,4'-C-Methylenecytidine
  modified_base 15: mod_base = OTHER; note = 2'-O,4'-C-Methylenecytidine
  modified_base 16: mod_base = gm
  modified_base 17: mod_base = OTHER; note = aminodiethoxymethanol-adenosine-N-acetylgalactosamine
  modified_base 18: mod_base = OTHER; note = aminodiethoxymethanol-adenosine-N-acetylgalactosamine
  modified_base 19: mod_base = OTHER; note = 2'-O,4'-C-Methyleneguanosine
  modified_base 20: mod_base = OTHER; note = 2'-O,4'-C-Methyleneguanosine
  modified_base 21: mod_base = OTHER; note = 2'-O,4'-C-Methylenecytidine
  source 1..21: mol_type = other RNA
aaactcagtttagccgaaggc

SEQ ID NO: 226 - RNA, 21 nt, synthetic construct
  misc_feature 1^2: note = linked via phosphorothioate
  modified_base 1: mod_base = OTHER; note = 2'-O,4'-C-Methyleneadenosine
  modified_base 2: mod_base = OTHER; note = 2'-Fluoro-adenosine
  modified_base 3: mod_base = OTHER; note = 2'-Fluoro-adenosine
  modified_base 4: mod_base = cm
  modified_base 5: mod_base = um
  modified_base 6: mod_base = cm
  modified_base 7: mod_base = OTHER; note = 2'-O,4'-C-Methyleneadenosine
  modified_base 8: mod_base = gm
  modified_base 9: mod_base = um
  modified_base 10: mod_base = um
  modified_base 11: mod_base = um
  modified_base 12: mod_base = OTHER; note = 2'-O-methyl-adenosine
  modified_base 13: mod_base = OTHER; note = 2'-O,4'-C-Methyleneguanosine
  modified_base 14: mod_base = OTHER; note = 2'-O,4'-C-Methylenecytidine
  modified_base 15: mod_base = OTHER; note = 2'-O,4'-C-Methylenecytidine
  modified_base 16: mod_base = gm
  modified_base 17: mod_base = OTHER; note = aminodiethoxymethanol-adenosine-N-acetylgalactosamine
  modified_base 18: mod_base = OTHER; note = aminodiethoxymethanol-adenosine-N-acetylgalactosamine
  modified_base 19: mod_base = OTHER; note = 2'-O,4'-C-Methyleneguanosine
  modified_base 20: mod_base = OTHER; note = 2'-O,4'-C-Methyleneguanosine
  modified_base 21: mod_base = OTHER; note = 2'-O,4'-C-Methylenecytidine
  source 1..21: mol_type = other RNA
aaactcagtttagccgaaggc

SEQ ID NO: 227 - RNA, 21 nt, synthetic construct
  misc_feature 1^2: note = linked via phosphorothioate
  modified_base 1: mod_base = OTHER; note = 2'-O,4'-C-Methyleneadenosine
  modified_base 2: mod_base = OTHER; note = 2'-Fluoro-adenosine
  modified_base 3: mod_base = OTHER; note = 2'-Fluoro-adenosine
  modified_base 4: mod_base = cm
  modified_base 5: mod_base = um
  modified_base 6: mod_base = cm
  modified_base 7: mod_base = OTHER; note = 2'-O,4'-C-Methyleneadenosine
  modified_base 8: mod_base = OTHER; note = 2'-O,4'-C-Methyleneguanosine
  modified_base 9: mod_base = um
  modified_base 10: mod_base = um
  modified_base 11: mod_base = um
  modified_base 12: mod_base = OTHER; note = 2'-O-methyl-adenosine
  modified_base 13: mod_base = OTHER; note = 2'-O,4'-C-Methyleneguanosine
  modified_base 14: mod_base = OTHER; note = 2'-O,4'-C-Methylenecytidine
  modified_base 15: mod_base = OTHER; note = 2'-O,4'-C-Methylenecytidine
  modified_base 16: mod_base = gm
  modified_base 17: mod_base = OTHER; note = aminodiethoxymethanol-adenosine-N-acetylgalactosamine
  modified_base 18: mod_base = OTHER; note = aminodiethoxymethanol-adenosine-N-acetylgalactosamine
  modified_base 19: mod_base = OTHER; note = 2'-O,4'-C-Methyleneguanosine
  modified_base 20: mod_base = OTHER; note = 2'-O,4'-C-Methyleneguanosine
  modified_base 21: mod_base = OTHER; note = 2'-O,4'-C-Methylenecytidine
  source 1..21: mol_type = other RNA
aaactcagtttagccgaaggc

SEQ ID NO: 228 - DNA, 21 bp, synthetic construct
  misc_feature 1..9: note = RNA fragment
  misc_feature 10..11: note = DNA fragment
  misc_feature 12..21: note = RNA fragment
  misc_feature 1^2: note = linked via phosphorothioate
  modified_base 1: mod_base = OTHER; note = 2'-O,4'-C-Methyleneadenosine
  modified_base 2: mod_base = OTHER; note = 2'-Fluoro-adenosine
  modified_base 3: mod_base = OTHER; note = 2'-Fluoro-adenosine
  modified_base 4: mod_base = cm
  modified_base 5: mod_base = um
  modified_base 6: mod_base = cm
  modified_base 7: mod_base = OTHER; note = 2'-O,4'-C-Methyleneadenosine
  modified_base 8: mod_base = OTHER; note = 2'-O,4'-C-Methyleneguanosine
  modified_base 9: mod_base = um
  modified_base 10: mod_base = OTHER; note = 2'-O,4'-C-Methylenethymine
  modified_base 11: mod_base = OTHER; note = 2'-O,4'-C-Methylenethymine
  modified_base 12: mod_base = OTHER; note = 2'-O-methyl-adenosine
  modified_base 13: mod_base = OTHER; note = 2'-O,4'-C-Methyleneguanosine
  modified_base 14: mod_base = OTHER; note = 2'-O,4'-C-Methylenecytidine
  modified_base 15: mod_base = OTHER; note = 2'-O,4'-C-Methylenecytidine
  modified_base 16: mod_base = gm
  modified_base 17: mod_base = OTHER; note = aminodiethoxymethanol-adenosine-N-acetylgalactosamine
  modified_base 18: mod_base = OTHER; note = aminodiethoxymethanol-adenosine-N-acetylgalactosamine
  modified_base 19: mod_base = OTHER; note = 2'-O,4'-C-Methyleneguanosine
  modified_base 20: mod_base = OTHER; note = 2'-O,4'-C-Methyleneguanosine
  modified_base 21: mod_base = OTHER; note = 2'-O,4'-C-Methylenecytidine
  source 1..21: mol_type = other DNA
aaactcagtttagccgaaggc

SEQ ID NO: 229 - RNA, 22 nt, synthetic construct
  misc_feature 1..3: note = linked via phosphorothioate
  modified_base 1: mod_base = OTHER; note = 4'-O-monomethylphosphonate-2'-O-methylmethyluridine
  modified_base 2: mod_base = OTHER; note = 2'-Fluoro-adenosine
  modified_base 3: mod_base = OTHER; note = 2'-Fluoro-adenosine
  modified_base 4: mod_base = OTHER; note = 2'-Fluoro-adenosine
  modified_base 5: mod_base = OTHER; note = 2'-Fluoro-cytidine
  modified_base 6: mod_base = um
  modified_base 7: mod_base = OTHER; note = 2'-Fluoro-guanosine
  modified_base 8: mod_base = OTHER; note = 2'-O-methyl-adenosine
  modified_base 9: mod_base = gm
  modified_base 10: mod_base = OTHER; note = 2'-Fluoro-uridine
  modified_base 11: mod_base = um
  modified_base 12: mod_base = um
  misc_feature 13..15: note = linked via phosphorothioate
  modified_base 13: mod_base = cm
  modified_base 14: mod_base = OTHER; note = 2'-Fluoro-adenosine
  modified_base 15: mod_base = um
  modified_base 16: mod_base = cm
  modified_base 17: mod_base = cm
  modified_base 18: mod_base = OTHER; note = 2'-O-methyl-adenosine
  modified_base 19: mod_base = cm
  misc_feature 20..22: note = linked via phosphorothioate
  modified_base 20: mod_base = cm
  modified_base 21: mod_base = gm
  modified_base 22: mod_base = gm
  source 1..22: mol_type = other RNA
taaactgagtttcatccaccgg

SEQ ID NO: 230 - RNA, 22 nt, synthetic construct
  misc_feature 1..3: note = linked via phosphorothioate
  modified_base 1: mod_base = OTHER; note = 4'-O-monomethylphosphonate-2'-O-methylmethyluridine
  modified_base 2: mod_base = OTHER; note = 2'-Fluoro-adenosine
  modified_base 3: mod_base = OTHER; note = 2'-Fluoro-adenosine
  modified_base 4: mod_base = OTHER; note = 2'-Fluoro-adenosine
  modified_base 5: mod_base = OTHER; note = 2'-Fluoro-cytidine
  modified_base 6: mod_base = um
  modified_base 7: mod_base = OTHER; note = 2'-Fluoro-guanosine
  modified_base 8: mod_base = OTHER; note = 2'-O-methyl-adenosine
  modified_base 9: mod_base = gm
  modified_base 10: mod_base = OTHER; note = 2'-Fluoro-uridine
  modified_base 11: mod_base = um
  modified_base 12: mod_base = um
  misc_feature 13..15: note = linked via phosphorothioate
  modified_base 13: mod_base = cm
  modified_base 14: mod_base = OTHER; note = 2'-Fluoro-adenosine
  modified_base 15: mod_base = um
  modified_base 16: mod_base = cm
  modified_base 17: mod_base = cm
  modified_base 18: mod_base = OTHER; note = 2'-O-methyl-adenosine
  modified_base 19: mod_base = cm
  misc_feature 20..22: note = linked via phosphorothioate
  modified_base 20: mod_base = cm
  modified_base 21: mod_base = gm
  modified_base 22: mod_base = gm
  source 1..22: mol_type = other RNA
taaactgagtttcatccaccgg

SEQ ID NO: 231 - RNA, 22 nt, synthetic construct
  misc_feature 1..3: note = linked via phosphorothioate
  modified_base 1: mod_base = OTHER; note = 4'-O-monomethylphosphonate-2'-O-methylmethyluridine
  modified_base 2: mod_base = OTHER; note = 2'-Fluoro-adenosine
  modified_base 3: mod_base = OTHER; note = 2'-Fluoro-adenosine
  modified_base 4: mod_base = OTHER; note = 2'-Fluoro-adenosine
  modified_base 5: mod_base = OTHER; note = 2'-Fluoro-cytidine
  modified_base 6: mod_base = um
  modified_base 7: mod_base = OTHER; note = 2'-Fluoro-guanosine
  modified_base 8: mod_base = OTHER; note = 2'-O-methyl-adenosine
  modified_base 9: mod_base = gm
  modified_base 10: mod_base = OTHER; note = 2'-Fluoro-uridine
  modified_base 11: mod_base = um
  modified_base 12: mod_base = um
  misc_feature 13..15: note = linked via phosphorothioate
  modified_base 13: mod_base = cm
  modified_base 14: mod_base = OTHER; note = 2'-Fluoro-adenosine
  modified_base 15: mod_base = um
  modified_base 16: mod_base = cm
  modified_base 17: mod_base = cm
  modified_base 18: mod_base = OTHER; note = 2'-O-methyl-adenosine
  modified_base 19: mod_base = cm
  misc_feature 20..22: note = linked via phosphorothioate
  modified_base 20: mod_base = cm
  modified_base 21: mod_base = gm
  modified_base 22: mod_base = gm
  source 1..22: mol_type = other RNA
taaactgagtttcatccaccgg

SEQ ID NO: 232 - RNA, 22 nt, synthetic construct
  misc_feature 1..3: note = linked via phosphorothioate
  modified_base 1: mod_base = OTHER; note = 4'-O-monomethylphosphonate-2'-O-methylmethyluridine
  modified_base 2: mod_base = OTHER; note = 2'-Fluoro-adenosine
  modified_base 3: mod_base = OTHER; note = 2'-Fluoro-adenosine
  modified_base 4: mod_base = OTHER; note = 2'-Fluoro-adenosine
  modified_base 5: mod_base = OTHER; note = 2'-Fluoro-cytidine
  modified_base 6: mod_base = um
  modified_base 7: mod_base = OTHER; note = 2'-Fluoro-guanosine
  modified_base 8: mod_base = OTHER; note = 2'-O-methyl-adenosine
  modified_base 9: mod_base = gm
  modified_base 10: mod_base = OTHER; note = 2'-Fluoro-uridine
  modified_base 11: mod_base = um
  modified_base 12: mod_base = um
  misc_feature 13..15: note = linked via phosphorothioate
  modified_base 13: mod_base = cm
  modified_base 14: mod_base = OTHER; note = 2'-Fluoro-adenosine
  modified_base 15: mod_base = um
  modified_base 16: mod_base = cm
  modified_base 17: mod_base = cm
  modified_base 18: mod_base = OTHER; note = 2'-O-methyl-adenosine
  modified_base 19: mod_base = cm
  misc_feature 20..22: note = linked via phosphorothioate
  modified_base 20: mod_base = cm
  modified_base 21: mod_base = gm
  modified_base 22: mod_base = gm
  source 1..22: mol_type = other RNA
taaactgagtttcatccaccgg

SEQ ID NO: 233 - RNA, 22 nt, synthetic construct
  misc_feature 1..3: note = linked via phosphorothioate
  modified_base 1: mod_base = OTHER; note = 4'-O-monomethylphosphonate-2'-O-methylmethyluridine
  modified_base 2: mod_base = OTHER; note = 2'-Fluoro-adenosine
  modified_base 3: mod_base = OTHER; note = 2'-Fluoro-adenosine
  modified_base 4: mod_base = OTHER; note = 2'-Fluoro-adenosine
  modified_base 5: mod_base = OTHER; note = 2'-Fluoro-cytidine
  modified_base 6: mod_base = um
  modified_base 7: mod_base = OTHER; note = 2'-Fluoro-guanosine
  modified_base 8: mod_base = OTHER; note = 2'-O-methyl-adenosine
  modified_base 9: mod_base = gm
  modified_base 10: mod_base = OTHER; note = 2'-Fluoro-uridine
  modified_base 11: mod_base = um
  modified_base 12: mod_base = um
  misc_feature 13..15: note = linked via phosphorothioate
  modified_base 13: mod_base = cm
  modified_base 14: mod_base = OTHER; note = 2'-Fluoro-adenosine
  modified_base 15: mod_base = um
  modified_base 16: mod_base = cm
  modified_base 17: mod_base = cm
  modified_base 18: mod_base = OTHER; note = 2'-O-methyl-adenosine
  modified_base 19: mod_base = cm
  misc_feature 20..22: note = linked via phosphorothioate
  modified_base 20: mod_base = cm
  modified_base 21: mod_base = gm
  modified_base 22: mod_base = gm
  source 1..22: mol_type = other RNA
taaactgagtttcatccaccgg

SEQ ID NO: 234 - RNA, 22 nt, synthetic construct
  misc_feature 1..3: note = linked via phosphorothioate
  modified_base 1: mod_base = OTHER; note = 4'-O-monomethylphosphonate-2'-O-methylmethyluridine
  modified_base 2: mod_base = OTHER; note = 2'-Fluoro-adenosine
  modified_base 3: mod_base = OTHER; note = 2'-Fluoro-adenosine
  modified_base 4: mod_base = OTHER; note = 2'-Fluoro-adenosine
  modified_base 5: mod_base = OTHER; note = 2'-Fluoro-cytidine
  modified_base 6: mod_base = um
  modified_base 7: mod_base = OTHER; note = 2'-Fluoro-guanosine
  modified_base 8: mod_base = OTHER; note = 2'-O-methyl-adenosine
  modified_base 9: mod_base = gm
  modified_base 10: mod_base = OTHER; note = 2'-Fluoro-uridine
  modified_base 11: mod_base = um
  modified_base 12: mod_base = um
  misc_feature 13..15: note = linked via phosphorothioate
  modified_base 13: mod_base = cm
  modified_base 14: mod_base = OTHER; note = 2'-Fluoro-adenosine
  modified_base 15: mod_base = um
  modified_base 16: mod_base = cm
  modified_base 17: mod_base = cm
  modified_base 18: mod_base = OTHER; note = 2'-O-methyl-adenosine
  modified_base 19: mod_base = cm
  misc_feature 20..22: note = linked via phosphorothioate
  modified_base 20: mod_base = cm
  modified_base 21: mod_base = gm
  modified_base 22: mod_base = gm
  source 1..22: mol_type = other RNA
taaactgagtttcatccaccgg

SEQ ID NO: 235 - RNA, 22 nt, synthetic construct
  misc_feature 1..3: note = linked via phosphorothioate
  modified_base 1: mod_base = OTHER; note = 4'-O-monomethylphosphonate-2'-O-methylmethyluridine
  modified_base 2: mod_base = OTHER; note = 2'-Fluoro-adenosine
  modified_base 3: mod_base = OTHER; note = 2'-Fluoro-adenosine
  modified_base 4: mod_base = OTHER; note = 2'-Fluoro-adenosine
  modified_base 5: mod_base = OTHER; note = 2'-Fluoro-cytidine
  modified_base 6: mod_base = um
  modified_base 7: mod_base = OTHER; note = 2'-Fluoro-guanosine
  modified_base 8: mod_base = OTHER; note = 2'-O-methyl-adenosine
  modified_base 9: mod_base = gm
  modified_base 10: mod_base = OTHER; note = 2'-Fluoro-uridine
  modified_base 11: mod_base = um
  modified_base 12: mod_base = um
  misc_feature 13..15: note = linked via phosphorothioate
  modified_base 13: mod_base = cm
  modified_base 14: mod_base = OTHER; note = 2'-Fluoro-adenosine
  modified_base 15: mod_base = um
  modified_base 16: mod_base = cm
  modified_base 17: mod_base = cm
  modified_base 18: mod_base = OTHER; note = 2'-O-methyl-adenosine
  modified_base 19: mod_base = cm
  misc_feature 20..22: note = linked via phosphorothioate
  modified_base 20: mod_base = cm
  modified_base 21: mod_base = gm
  modified_base 22: mod_base = gm
  source 1..22: mol_type = other RNA
taaactgagtttcatccaccgg

SEQ ID NO: 236 - RNA, 22 nt, synthetic construct
  misc_feature 1..3: note = linked via phosphorothioate
  modified_base 1: mod_base = OTHER; note = 4'-O-monomethylphosphonate-2'-O-methylmethyluridine
  modified_base 2: mod_base = OTHER; note = 2'-Fluoro-adenosine
  modified_base 3: mod_base = OTHER; note = 2'-Fluoro-adenosine
  modified_base 4: mod_base = OTHER; note = 2'-Fluoro-adenosine
  modified_base 5: mod_base = OTHER; note = 2'-Fluoro-cytidine
  modified_base 6: mod_base = um
  modified_base 7: mod_base = OTHER; note = 2'-Fluoro-guanosine
  modified_base 8: mod_base = OTHER; note = 2'-O-methyl-adenosine
  modified_base 9: mod_base = gm
  modified_base 10: mod_base = OTHER; note = 2'-Fluoro-uridine
  modified_base 11: mod_base = um
  modified_base 12: mod_base = um
  misc_feature 13..15: note = linked via phosphorothioate
  modified_base 13: mod_base = cm
  modified_base 14: mod_base = OTHER; note = 2'-Fluoro-adenosine
  modified_base 15: mod_base = um
  modified_base 16: mod_base = cm
  modified_base 17: mod_base = cm
  modified_base 18: mod_base = OTHER; note = 2'-O-methyl-adenosine
  modified_base 19: mod_base = cm
  misc_feature 20..22: note = linked via phosphorothioate
  modified_base 20: mod_base = cm
  modified_base 21: mod_base = gm
  modified_base 22: mod_base = gm
  source 1..22: mol_type = other RNA
taaactgagtttcatccaccgg

SEQ ID NO: 237 - RNA, 22 nt, synthetic construct
  misc_feature 1..3: note = linked via phosphorothioate
  modified_base 1: mod_base = OTHER; note = 4'-O-monomethylphosphonate-2'-O-methylmethyluridine
  modified_base 2: mod_base = OTHER; note = 2'-Fluoro-adenosine
  modified_base 3: mod_base = OTHER; note = 2'-Fluoro-adenosine
  modified_base 4: mod_base = OTHER; note = 2'-Fluoro-adenosine
  modified_base 5: mod_base = OTHER; note = 2'-Fluoro-cytidine
  modified_base 6: mod_base = um
  modified_base 7: mod_base = OTHER; note = 2'-Fluoro-guanosine
  modified_base 8: mod_base = OTHER; note = 2'-O-methyl-adenosine
  modified_base 9: mod_base = gm
  modified_base 10: mod_base = OTHER; note = 2'-Fluoro-uridine
  modified_base 11: mod_base = um
  modified_base 12: mod_base = um
  misc_feature 13..15: note = linked via phosphorothioate
  modified_base 13: mod_base = cm
  modified_base 14: mod_base = OTHER; note = 2'-Fluoro-adenosine
  modified_base 15: mod_base = um
  modified_base 16: mod_base = cm
  modified_base 17: mod_base = cm
  modified_base 18: mod_base = OTHER; note = 2'-O-methyl-adenosine
  modified_base 19: mod_base = cm
  misc_feature 20..22: note = linked via phosphorothioate
  modified_base 20: mod_base = cm
  modified_base 21: mod_base = gm
  modified_base 22: mod_base = gm
  source 1..22: mol_type = other RNA
taaactgagtttcatccaccgg

SEQ ID NO: 238 - RNA, 22 nt, synthetic construct
  misc_feature 1..3: note = linked via phosphorothioate
  modified_base 1: mod_base = OTHER; note = 4'-O-monomethylphosphonate-2'-O-methylmethyluridine
  modified_base 2: mod_base = OTHER; note = 2'-Fluoro-adenosine
  modified_base 3: mod_base = OTHER; note = 2'-Fluoro-adenosine
  modified_base 4: mod_base = OTHER; note = 2'-Fluoro-adenosine
  modified_base 5: mod_base = OTHER; note = 2'-Fluoro-cytidine
  modified_base 6: mod_base = um
  modified_base 7: mod_base = OTHER; note = 2'-Fluoro-guanosine
  modified_base 8: mod_base = OTHER; note = 2'-O-methyl-adenosine
  modified_base 9: mod_base = gm
  modified_base 10: mod_base = OTHER; note = 2'-Fluoro-uridine
  modified_base 11: mod_base = um
  modified_base 12: mod_base = um
  misc_feature 13..15: note = linked via phosphorothioate
  modified_base 13: mod_base = cm
  modified_base 14: mod_base = OTHER; note = 2'-Fluoro-adenosine
  modified_base 15: mod_base = um
  modified_base 16: mod_base = cm
  modified_base 17: mod_base = cm
  modified_base 18: mod_base = OTHER; note = 2'-O-methyl-adenosine
  modified_base 19: mod_base = cm
  misc_feature 20..22: note = linked via phosphorothioate
  modified_base 20: mod_base = cm
  modified_base 21: mod_base = gm
  modified_base 22: mod_base = gm
  source 1..22: mol_type = other RNA
taaactgagtttcatccaccgg

SEQ ID NO: 239 - RNA, 22 nt, synthetic construct
  misc_feature 1..3: note = linked via phosphorothioate
  modified_base 1: mod_base = OTHER; note = 4'-O-monomethylphosphonate-2'-O-methylmethyluridine
  modified_base 2: mod_base = OTHER; note = 2'-Fluoro-adenosine
  modified_base 3: mod_base = OTHER; note = 2'-Fluoro-adenosine
  modified_base 4: mod_base = OTHER; note = 2'-Fluoro-adenosine
  modified_base 5: mod_base = OTHER; note = 2'-Fluoro-cytidine
  modified_base 6: mod_base = um
  modified_base 7: mod_base = OTHER; note = 2'-Fluoro-guanosine
  modified_base 8: mod_base = OTHER; note = 2'-O-methyl-adenosine
  modified_base 9: mod_base = gm
  modified_base 10: mod_base = OTHER; note = 2'-Fluoro-uridine
  modified_base 11: mod_base = um
  modified_base 12: mod_base = um
  misc_feature 13..15: note = linked via phosphorothioate
  modified_base 13: mod_base = cm
  modified_base 14: mod_base = OTHER; note = 2'-Fluoro-adenosine
  modified_base 15: mod_base = um
  modified_base 16: mod_base = cm
  modified_base 17: mod_base = cm
  modified_base 18: mod_base = OTHER; note = 2'-O-methyl-adenosine
  modified_base 19: mod_base = cm
  misc_feature 20..22: note = linked via phosphorothioate
  modified_base 20: mod_base = cm
  modified_base 21: mod_base = gm
  modified_base 22: mod_base = gm
  source 1..22: mol_type = other RNA
taaactgagtttcatccaccgg

SEQ ID NO: 240 - RNA, 22 nt, synthetic construct
  misc_feature 1..3: note = linked via phosphorothioate
  modified_base 1: mod_base = OTHER; note = 4'-O-monomethylphosphonate-2'-O-methylmethyluridine
  modified_base 2: mod_base = OTHER; note = 2'-Fluoro-adenosine
  modified_base 3: mod_base = OTHER; note = 2'-Fluoro-adenosine
  modified_base 4: mod_base = OTHER; note = 2'-Fluoro-adenosine
  modified_base 5: mod_base = OTHER; note = 2'-Fluoro-cytidine
  modified_base 6: mod_base = um
  modified_base 7: mod_base = OTHER; note = 2'-Fluoro-guanosine
  modified_base 8: mod_base = OTHER; note = 2'-O-methyl-adenosine
  modified_base 9: mod_base = gm
  modified_base 10: mod_base = OTHER; note = 2'-Fluoro-uridine
  modified_base 11: mod_base = um
  modified_base 12: mod_base = um
  misc_feature 13..15: note = linked via phosphorothioate
  modified_base 13: mod_base = cm
  modified_base 14: mod_base = OTHER; note = 2'-Fluoro-adenosine
  modified_base 15: mod_base = um
  modified_base 16: mod_base = cm
  modified_base 17: mod_base = cm
  modified_base 18: mod_base = OTHER; note = 2'-O-methyl-adenosine
  modified_base 19: mod_base = cm
  misc_feature 20..22: note = linked via phosphorothioate
  modified_base 20: mod_base = cm
  modified_base 21: mod_base = gm
  modified_base 22: mod_base = gm
  source 1..22: mol_type = other RNA
taaactgagtttcatccaccgg

SEQ ID NO: 241 - RNA, 16 nt, synthetic construct
  source 1..16: mol_type = other RNA
gatgaaactcagttta

SEQ ID NO: 242 - RNA, 16 nt, synthetic construct
  source 1..16: mol_type = other RNA
gatgaaactcagttta

SEQ ID NO: 243 - RNA, 16 nt, synthetic construct
  source 1..16: mol_type = other RNA
gatgaaactcagttta

SEQ ID NO: 244 - RNA, 16 nt, synthetic construct
  source 1..16: mol_type = other RNA
gatgaaactcagttta

SEQ ID NO: 245 - RNA, 16 nt, synthetic construct
  source 1..16: mol_type = other RNA
gatgaaactcagttta

SEQ ID NO: 246 - RNA, 16 nt, synthetic construct
  source 1..16: mol_type = other RNA
gatgaaactcagttta

SEQ ID NO: 247 - RNA, 16 nt, synthetic construct
  source 1..16: mol_type = other RNA
gatgaaactcagttta

SEQ ID NO: 248 - RNA, 16 nt, synthetic construct
  source 1..16: mol_type = other RNA
gatgaaactcagttta

SEQ ID NO: 249 - RNA, 16 nt, synthetic construct
  source 1..16: mol_type = other RNA
gatgaaactcagttta

SEQ ID NO: 250 - RNA, 22 nt, synthetic construct
  source 1..22: mol_type = other RNA
taaactgagtttcatccactgg

SEQ ID NO: 251 - RNA, 22 nt, synthetic construct
  source 1..22: mol_type = other RNA
taaactgagtttcatccactgg

SEQ ID NO: 252 - RNA, 22 nt, synthetic construct
  source 1..22: mol_type = other RNA
taaactgagtttcatccactgg

SEQ ID NO: 253 - RNA, 22 nt, synthetic construct
  source 1..22: mol_type = other RNA
taaactgagtttcatccactgg

SEQ ID NO: 254 - RNA, 22 nt, synthetic construct
  source 1..22: mol_type = other RNA
taaactgagtttcatccactgg

SEQ ID NO: 255 - RNA, 22 nt, synthetic construct
  source 1..22: mol_type = other RNA
taaactgagtttcatccactgg

SEQ ID NO: 256 - RNA, 22 nt, synthetic construct
  source 1..22: mol_type = other RNA
taaactgagtttcatccactgg

SEQ ID NO: 257 - RNA, 22 nt, synthetic construct
  source 1..22: mol_type = other RNA
taaactgagtttcatccactgg

SEQ ID NO: 258 - RNA, 22 nt, synthetic construct
  source 1..22: mol_type = other RNA
taaactgagtttcatccactgg

SEQ ID NO: 259 - RNA, 22 nt, synthetic construct
  source 1..22: mol_type = other RNA
taaactgagtttcatccactgg

SEQ ID NO: 260 - RNA, 16 nt, synthetic construct
  misc_feature 1^2: note = linked via phosphorothioate
  modified_base 1: mod_base = OTHER; note = 2'-O,4'-C-Methyleneguanosine
  modified_base 2: mod_base = OTHER; note = 2'-O-methyl-adenosine
  modified_base 3: mod_base = um
  modified_base 4: mod_base = OTHER; note = 2'-Fluoro-guanosine
  modified_base 5: mod_base = OTHER; note = 2'-Fluoro-adenosine
  modified_base 6: mod_base = OTHER; note = 2'-Fluoro-adenosine
  modified_base 7: mod_base = OTHER; note = 2'-Fluoro-adenosine
  modified_base 8: mod_base = cm
  modified_base 9: mod_base = um
  modified_base 10: mod_base = cm
  modified_base 11: mod_base = OTHER; note = 2'-O-methyl-adenosine
  modified_base 12: mod_base = gm
  modified_base 13: mod_base = um
  misc_feature 14..16: note = linked via phosphorothioate
  modified_base 14: mod_base = um
  modified_base 15: mod_base = um
  modified_base 16: mod_base = OTHER; note = hexadecanamidodiethoxymethanol-adenosine
  source 1..16: mol_type = other RNA
gatgaaactcagttta

SEQ ID NO: 261 - RNA, 16 nt, synthetic construct
  misc_feature 1^2: note = linked via phosphorothioate
  modified_base 1: mod_base = OTHER; note = 2'-O,4'-C-Methyleneguanosine
  modified_base 2: mod_base = OTHER; note = 2'-O-methyl-adenosine
  modified_base 3: mod_base = um
  modified_base 4: mod_base = OTHER; note = 2'-Fluoro-guanosine
  modified_base 5: mod_base = OTHER; note = 2'-Fluoro-adenosine
  modified_base 6: mod_base = OTHER; note = 2'-Fluoro-adenosine
  modified_base 7: mod_base = OTHER; note = 2'-Fluoro-adenosine
  modified_base 8: mod_base = cm
  modified_base 9: mod_base = um
  modified_base 10: mod_base = cm
  modified_base 11: mod_base = OTHER; note = 2'-O,4'-C-Methyleneadenosine
  modified_base 12: mod_base = gm
  modified_base 13: mod_base = um
  misc_feature 14..16: note = linked via phosphorothioate
  modified_base 14: mod_base = um
  modified_base 15: mod_base = um
  modified_base 16: mod_base = OTHER; note = hexadecanamidodiethoxymethanol-adenosine
  source 1..16: mol_type = other RNA
gatgaaactcagttta

SEQ ID NO: 262 - RNA, 16 nt, synthetic construct
  misc_feature 1^2: note = linked via phosphorothioate
  modified_base 1: mod_base = OTHER; note = 2'-O,4'-C-Methyleneguanosine
  modified_base 2: mod_base = OTHER; note = 2'-O-methyl-adenosine
  modified_base 3: mod_base = um
  modified_base 4: mod_base = OTHER; note = 2'-Fluoro-guanosine
  modified_base 5: mod_base = OTHER; note = 2'-Fluoro-adenosine
  modified_base 6: mod_base = OTHER; note = 2'-Fluoro-adenosine
  modified_base 7: mod_base = OTHER; note = 2'-Fluoro-adenosine
  modified_base 8: mod_base = cm
  modified_base 9: mod_base = um
  modified_base 10: mod_base = cm
  modified_base 11: mod_base = OTHER; note = 2'-O,4'-C-Methyleneadenosine
  modified_base 12: mod_base = OTHER; note = 2'-O,4'-C-Methyleneguanosine
  modified_base 13: mod_base = um
  misc_feature 14..16: note = linked via phosphorothioate
  modified_base 14: mod_base = um
  modified_base 15: mod_base = um
  modified_base 16: mod_base = OTHER; note = hexadecanamidodiethoxymethanol-adenosine
  source 1..16: mol_type = other RNA
gatgaaactcagttta

SEQ ID NO: 263 - RNA, 16 nt, synthetic construct
  misc_feature 1^2: note = linked via phosphorothioate
  modified_base 1: mod_base = OTHER; note = hexadecanamidodiethoxymethanol-guanosine
  modified_base 2: mod_base = OTHER; note = 2'-O,4'-C-Methyleneadenosine
  modified_base 3: mod_base = um
  modified_base 4: mod_base = OTHER; note = 2'-Fluoro-guanosine
  modified_base 5: mod_base = OTHER; note = 2'-Fluoro-adenosine
  modified_base 6: mod_base = OTHER; note = 2'-Fluoro-adenosine
  modified_base 7: mod_base = OTHER; note = 2'-Fluoro-adenosine
  modified_base 8: mod_base = cm
  modified_base 9: mod_base = um
  modified_base 10: mod_base = cm
  modified_base 11: mod_base = OTHER; note = 2'-O-methyl-adenosine
  modified_base 12: mod_base = gm
  modified_base 13: mod_base = um
  misc_feature 14..16: note = linked via phosphorothioate
  modified_base 14: mod_base = um
  modified_base 15: mod_base = um
  modified_base 16: mod_base = OTHER; note = 2'-O-methyl-adenosine
  source 1..16: mol_type = other RNA
gatgaaactcagttta

SEQ ID NO: 264 - RNA, 16 nt, synthetic construct
  misc_feature 1^2: note = linked via phosphorothioate
  modified_base 1: mod_base = OTHER; note = hexadecanamidodiethoxymethanol-guanosine
  modified_base 2: mod_base = OTHER; note = 2'-O,4'-C-Methyleneadenosine
  modified_base 3: mod_base = um
  modified_base 4: mod_base = OTHER; note = 2'-Fluoro-guanosine
  modified_base 5: mod_base = OTHER; note = 2'-Fluoro-adenosine
  modified_base 6: mod_base = OTHER; note = 2'-Fluoro-adenosine
  modified_base 7: mod_base = OTHER; note = 2'-Fluoro-adenosine
  modified_base 8: mod_base = cm
  modified_base 9: mod_base = um
  modified_base 10: mod_base = cm
  modified_base 11: mod_base = OTHER; note = 2'-O,4'-C-Methyleneadenosine
  modified_base 12: mod_base = gm
  modified_base 13: mod_base = um
  misc_feature 14..16: note = linked via phosphorothioate
  modified_base 14: mod_base = um
  modified_base 15: mod_base = um
  modified_base 16: mod_base = OTHER; note = 2'-O-methyl-adenosine
  source 1..16: mol_type = other RNA
gatgaaactcagttta

SEQ ID NO: 265 - RNA, 16 nt, synthetic construct
  misc_feature 1^2: note = linked via phosphorothioate
  modified_base 1: mod_base = OTHER; note = hexadecanamidodiethoxymethanol-guanosine
  modified_base 2: mod_base = OTHER; note = 2'-O,4'-C-Methyleneadenosine
  modified_base 3: mod_base = um
  modified_base 4: mod_base = OTHER; note = 2'-Fluoro-guanosine
  modified_base 5: mod_base = OTHER; note = 2'-Fluoro-adenosine
  modified_base 6: mod_base = OTHER; note = 2'-Fluoro-adenosine
  modified_base 7: mod_base = OTHER; note = 2'-Fluoro-adenosine
  modified_base 8: mod_base = cm
  modified_base 9: mod_base = um
  modified_base 10: mod_base = cm
  modified_base 11: mod_base = OTHER; note = 2'-O,4'-C-Methyleneadenosine
  modified_base 12: mod_base = OTHER; note = 2'-O,4'-C-Methyleneguanosine
  modified_base 13: mod_base = um
  misc_feature 14..16: note = linked via phosphorothioate
  modified_base 14: mod_base = um
  modified_base 15: mod_base = um
  modified_base 16: mod_base = OTHER; note = 2'-O-methyl-adenosine
  source 1..16: mol_type = other RNA
gatgaaactcagttta

SEQ ID NO: 266 - RNA, 16 nt, synthetic construct
  misc_feature 1^2: note = linked via phosphorothioate
  modified_base 1: mod_base = OTHER; note = 2'-O,4'-C-Methyleneguanosine
  modified_base 2: mod_base = OTHER; note = 2'-O-methyl-adenosine
  modified_base 3: mod_base = um
  modified_base 4: mod_base = OTHER; note = 2'-Fluoro-guanosine
  modified_base 5: mod_base = OTHER; note = hexadecanamidodiethoxymethanol-adenosine
  modified_base 6: mod_base = OTHER; note = 2'-Fluoro-adenosine
  modified_base 7: mod_base = OTHER; note = 2'-Fluoro-adenosine
  modified_base 8: mod_base = cm
  modified_base 9: mod_base = um
  modified_base 10: mod_base = cm
  modified_base 11: mod_base = OTHER; note = 2'-O-methyl-adenosine
  modified_base 12: mod_base = gm
  modified_base 13: mod_base = um
  misc_feature 14..16: note = linked via phosphorothioate
  modified_base 14: mod_base = um
  modified_base 15: mod_base = um
  modified_base 16: mod_base = OTHER; note = 2'-O-methyl-adenosine
  source 1..16: mol_type = other RNA
gatgaaactcagttta

SEQ ID NO: 267 - RNA, 16 nt, synthetic construct
  misc_feature 1^2: note = linked via phosphorothioate
  modified_base 1: mod_base = OTHER; note = 2'-O,4'-C-Methyleneguanosine
  modified_base 2: mod_base = OTHER; note = 2'-O-methyl-adenosine
  modified_base 3: mod_base = um
  modified_base 4: mod_base = OTHER; note = 2'-Fluoro-guanosine
  modified_base 5: mod_base = OTHER; note = hexadecanamidodiethoxymethanol-adenosine
  modified_base 6: mod_base = OTHER; note = 2'-Fluoro-adenosine
  modified_base 7: mod_base = OTHER; note = 2'-Fluoro-adenosine
  modified_base 8: mod_base = cm
  modified_base 9: mod_base = um
  modified_base 10: mod_base = cm
  modified_base 11: mod_base = OTHER; note = 2'-O,4'-C-Methyleneadenosine
  modified_base 12: mod_base = gm
  modified_base 13: mod_base = um
  misc_feature 14..16: note = linked via phosphorothioate
  modified_base 14: mod_base = um
  modified_base 15: mod_base = um
  modified_base 16: mod_base = OTHER; note = 2'-O-methyl-adenosine
  source 1..16: mol_type = other RNA
gatgaaactcagttta

SEQ ID NO: 268 - RNA, 16 nt, synthetic construct
  misc_feature 1^2: note = linked via phosphorothioate
  modified_base 1: mod_base = OTHER; note = 2'-O,4'-C-Methyleneguanosine
  modified_base 2: mod_base = OTHER; note = 2'-O-methyl-adenosine
  modified_base 3: mod_base = um
  modified_base 4: mod_base = OTHER; note = 2'-Fluoro-guanosine
  modified_base 5: mod_base = OTHER; note = hexadecanamidodiethoxymethanol-adenosine
  modified_base 6: mod_base = OTHER; note = 2'-Fluoro-adenosine
  modified_base 7: mod_base = OTHER; note = 2'-Fluoro-adenosine
  modified_base 8: mod_base = cm
  modified_base 9: mod_base = um
  modified_base 10: mod_base = cm
  modified_base 11: mod_base = OTHER; note = 2'-O,4'-C-Methyleneadenosine
  modified_base 12: mod_base = OTHER; note = 2'-O,4'-C-Methyleneguanosine
  modified_base 13: mod_base = um
  misc_feature 14..16: note = linked via phosphorothioate
  modified_base 14: mod_base = um
  modified_base 15: mod_base = um
  modified_base 16: mod_base = OTHER; note = 2'-O-methyl-adenosine
  source 1..16: mol_type = other RNA
gatgaaactcagttta

SEQ ID NO: 269 - RNA, 22 nt, synthetic construct
  misc_feature 1..4: note = linked via phosphorothioate
  modified_base 1: mod_base = OTHER; note = 4'-O-monomethylphosphonate-2'-O-methylmethyluridine
  modified_base 2: mod_base = OTHER; note = 2'-Fluoro-adenosine
  modified_base 3: mod_base = OTHER; note = 2'-Fluoro-adenosine
  modified_base 4: mod_base = OTHER; note = 2'-Fluoro-adenosine
  modified_base 5: mod_base = OTHER; note = 2'-Fluoro-cytidine
  modified_base 6: mod_base = um
  modified_base 7: mod_base = OTHER; note = 2'-Fluoro-guanosine
  modified_base 8: mod_base = OTHER; note = 2'-O-methyl-adenosine
  modified_base 9: mod_base = gm
  modified_base 10: mod_base = OTHER; note = 2'-Fluoro-uridine
  modified_base 11: mod_base = um
  modified_base 12: mod_base = um
  modified_base 13: mod_base = cm
  modified_base 14: mod_base = OTHER; note = 2'-Fluoro-adenosine
  modified_base 15: mod_base = um
  modified_base 16: mod_base = cm
  modified_base 17: mod_base = cm
  modified_base 18: mod_base = OTHER; note = 2'-O-methyl-adenosine
  modified_base 19: mod_base = cm
  misc_feature 20..22: note = linked via phosphorothioate
  modified_base 20: mod_base = um
  modified_base 21: mod_base = gm
  modified_base 22: mod_base = gm
  source 1..22: mol_type = other RNA
taaactgagtttcatccactgg

SEQ ID NO: 270 - RNA, 22 nt, synthetic construct
  misc_feature 1..4: note = linked via phosphorothioate
  modified_base 1: mod_base = OTHER; note = 4'-O-monomethylphosphonate-2'-O-methylmethyluridine
  modified_base 2: mod_base = OTHER; note = 2'-Fluoro-adenosine
  modified_base 3: mod_base = OTHER; note = 2'-Fluoro-adenosine
  modified_base 4: mod_base = OTHER; note = 2'-Fluoro-adenosine
  modified_base 5: mod_base = OTHER; note = 2'-Fluoro-cytidine
  modified_base 6: mod_base = um
  modified_base 7: mod_base = OTHER; note = 2'-Fluoro-guanosine
  modified_base 8: mod_base = OTHER; note = 2'-O-methyl-adenosine
  modified_base 9: mod_base = gm
  modified_base 10: mod_base = OTHER; note = 2'-Fluoro-uridine
  modified_base 11: mod_base = um
  modified_base 12: mod_base = um
  modified_base 13: mod_base = cm
  modified_base 14: mod_base = OTHER; note = 2'-Fluoro-adenosine
  modified_base 15: mod_base = um
  modified_base 16: mod_base = cm
  modified_base 17: mod_base = cm
  modified_base 18: mod_base = OTHER; note = 2'-O-methyl-adenosine
  modified_base 19: mod_base = cm
  misc_feature 20..22: note = linked via phosphorothioate
  modified_base 20: mod_base = um
  modified_base 21: mod_base = gm
  modified_base 22: mod_base = gm
  source 1..22: mol_type = other RNA
taaactgagtttcatccactgg

SEQ ID NO: 271 - RNA, 22 nt, synthetic construct
  misc_feature 1..4: note = linked via phosphorothioate
  modified_base 1: mod_base = OTHER; note = 4'-O-monomethylphosphonate-2'-O-methylmethyluridine
  modified_base 2: mod_base = OTHER; note = 2'-Fluoro-adenosine
  modified_base 3: mod_base = OTHER; note = 2'-Fluoro-adenosine
  modified_base 4: mod_base = OTHER; note = 2'-Fluoro-adenosine
  modified_base 5: mod_base = OTHER; note = 2'-Fluoro-cytidine
  modified_base 6: mod_base = um
  modified_base 7: mod_base = OTHER; note = 2'-Fluoro-guanosine
  modified_base 8: mod_base = OTHER; note = 2'-O-methyl-adenosine
  modified_base 9: mod_base = gm
  modified_base 10: mod_base = OTHER; note = 2'-Fluoro-uridine
  modified_base 11: mod_base = um
  modified_base 12: mod_base = um
  modified_base 13: mod_base = cm
  modified_base 14: mod_base = OTHER; note = 2'-Fluoro-adenosine
  modified_base 15: mod_base = um
  modified_base 16: mod_base = cm
  modified_base 17: mod_base = cm
  modified_base 18: mod_base = OTHER; note = 2'-O-methyl-adenosine
  modified_base 19: mod_base = cm
  misc_feature 20..22: note = linked via phosphorothioate
  modified_base 20: mod_base = um
  modified_base 21: mod_base = gm
  modified_base 22: mod_base = gm
  source 1..22: mol_type = other RNA
taaactgagtttcatccactgg

SEQ ID NO: 272 - RNA, 22 nt, synthetic construct
  misc_feature 1..4: note = linked via phosphorothioate
  modified_base 1: mod_base = OTHER; note = 4'-O-monomethylphosphonate-2'-O-methylmethyluridine
  modified_base 2: mod_base = OTHER; note = 2'-Fluoro-adenosine
  modified_base 3: mod_base = OTHER; note = 2'-Fluoro-adenosine
  modified_base 4: mod_base = OTHER; note = 2'-Fluoro-adenosine
  modified_base 5: mod_base = OTHER; note = 2'-Fluoro-cytidine
  modified_base 6: mod_base = um
  modified_base 7: mod_base = OTHER; note = 2'-Fluoro-guanosine
  modified_base 8: mod_base = OTHER; note = 2'-O-methyl-adenosine
  modified_base 9: mod_base = gm
  modified_base 10: mod_base = OTHER; note = 2'-Fluoro-uridine
  modified_base 11: mod_base = um
  modified_base 12: mod_base = um
  modified_base 13: mod_base = cm
  modified_base 14: mod_base = OTHER; note = 2'-Fluoro-adenosine
  modified_base 15: mod_base = um
  modified_base 16: mod_base = cm
  modified_base 17: mod_base = cm
  modified_base 18: mod_base = OTHER; note = 2'-O-methyl-adenosine
  modified_base 19: mod_base = cm
  misc_feature 20..22: note = linked via phosphorothioate
  modified_base 20: mod_base = um
  modified_base 21: mod_base = gm
  modified_base 22: mod_base = gm
  source 1..22: mol_type = other RNA
taaactgagtttcatccactgg

SEQ ID NO: 273 - RNA, 22 nt, synthetic construct
  misc_feature 1..4: note = linked via phosphorothioate
  modified_base 1: mod_base = OTHER; note = 4'-O-monomethylphosphonate-2'-O-methylmethyluridine
  modified_base 2: mod_base = OTHER; note = 2'-Fluoro-adenosine
  modified_base 3: mod_base = OTHER; note = 2'-Fluoro-adenosine
  modified_base 4: mod_base = OTHER; note = 2'-Fluoro-adenosine
  modified_base 5: mod_base = OTHER; note = 2'-Fluoro-cytidine
  modified_base 6: mod_base = um
  modified_base 7: mod_base = OTHER; note = 2'-Fluoro-guanosine
  modified_base 8: mod_base = OTHER; note = 2'-O-methyl-adenosine
  modified_base 9: mod_base = gm
  modified_base 10: mod_base = OTHER; note = 2'-Fluoro-uridine
  modified_base 11: mod_base = um
  modified_base 12: mod_base = um
  modified_base 13: mod_base = cm
  modified_base 14: mod_base = OTHER; note = 2'-Fluoro-adenosine
  modified_base 15: mod_base = um
  modified_base 16: mod_base = cm
  modified_base 17: mod_base = cm
  modified_base 18: mod_base = OTHER; note = 2'-O-methyl-adenosine
  modified_base 19: mod_base = cm
  misc_feature 20..22: note = linked via phosphorothioate
  modified_base 20: mod_base = um
  modified_base 21: mod_base = gm
  modified_base 22: mod_base = gm
  source 1..22: mol_type = other RNA
taaactgagtttcatccactgg

SEQ ID NO: 274 - RNA, 22 nt, synthetic construct
  misc_feature 1..4: note = linked via phosphorothioate
  modified_base 1: mod_base = OTHER; note = 4'-O-monomethylphosphonate-2'-O-methylmethyluridine
  modified_base 2: mod_base = OTHER; note = 2'-Fluoro-adenosine
  modified_base 3: mod_base = OTHER; note = 2'-Fluoro-adenosine
  modified_base 4: mod_base = OTHER; note = 2'-Fluoro-adenosine
  modified_base 5: mod_base = OTHER; note = 2'-Fluoro-cytidine
  modified_base 6: mod_base = um
  modified_base 7: mod_base = OTHER; note = 2'-Fluoro-guanosine
  modified_base 8: mod_base = OTHER; note = 2'-O-methyl-adenosine
  modified_base 9: mod_base = gm
  modified_base 10: mod_base = OTHER; note = 2'-Fluoro-uridine
  modified_base 11: mod_base = um
  modified_base 12: mod_base = um
  modified_base 13: mod_base = cm
  modified_base 14: mod_base = OTHER; note = 2'-Fluoro-adenosine
  modified_base 15: mod_base = um
  modified_base 16: mod_base = cm
  modified_base 17: mod_base = cm
  modified_base 18: mod_base = OTHER; note = 2'-O-methyl-adenosine
  modified_base 19: mod_base = cm
  misc_feature 20..22: note = linked via phosphorothioate
  modified_base 20: mod_base = um
  modified_base 21: mod_base = gm
  modified_base 22: mod_base = gm
  source 1..22: mol_type = other RNA
taaactgagtttcatccactgg

SEQ ID NO: 275 - RNA, 22 nt, synthetic construct
  misc_feature 1..4: note = linked via phosphorothioate
  modified_base 1: mod_base = OTHER; note = 4'-O-monomethylphosphonate-2'-O-methylmethyluridine
  modified_base 2: mod_base = OTHER; note = 2'-Fluoro-adenosine
  modified_base 3: mod_base = OTHER; note = 2'-Fluoro-adenosine
  modified_base 4: mod_base = OTHER; note = 2'-Fluoro-adenosine
  modified_base 5: mod_base = OTHER; note = 2'-Fluoro-cytidine
  modified_base 6: mod_base = um
  modified_base 7: mod_base = OTHER; note = 2'-Fluoro-guanosine
  modified_base 8: mod_base = OTHER; note = 2'-O-methyl-adenosine
  modified_base 9: mod_base = gm
  modified_base 10: mod_base = OTHER; note = 2'-Fluoro-uridine
  modified_base 11: mod_base = um
  modified_base 12: mod_base = um
  modified_base 13: mod_base = cm
  modified_base 14: mod_base = OTHER; note = 2'-Fluoro-adenosine
  modified_base 15: mod_base = um
  modified_base 16: mod_base = cm
  modified_base 17: mod_base = cm
  modified_base 18: mod_base = OTHER; note = 2'-O-methyl-adenosine
  modified_base 19: mod_base = cm
  misc_feature 20..22: note = linked via phosphorothioate
  modified_base 20: mod_base = um
  modified_base 21: mod_base = gm
  modified_base 22: mod_base = gm
  source 1..22: mol_type = other RNA
taaactgagtttcatccactgg

SEQ ID NO: 276 - RNA, 22 nt, synthetic construct
  misc_feature 1..4: note = linked via phosphorothioate
  modified_base 1: mod_base = OTHER; note = 4'-O-monomethylphosphonate-2'-O-methylmethyluridine
  modified_base 2: mod_base = OTHER; note = 2'-Fluoro-adenosine
  modified_base 3: mod_base = OTHER; note = 2'-Fluoro-adenosine
  modified_base 4: mod_base = OTHER; note = 2'-Fluoro-adenosine
  modified_base 5: mod_base = OTHER; note = 2'-Fluoro-cytidine
  modified_base 6: mod_base = um
  modified_base 7: mod_base = OTHER; note = 2'-Fluoro-guanosine
  modified_base 8: mod_base = OTHER; note = 2'-O-methyl-adenosine
  modified_base 9: mod_base = gm
  modified_base 10: mod_base = OTHER; note = 2'-Fluoro-uridine
  modified_base 11: mod_base = um
  modified_base 12: mod_base = um
  modified_base 13: mod_base = cm
  modified_base 14: mod_base = OTHER; note = 2'-Fluoro-adenosine
  modified_base 15: mod_base = um
  modified_base 16: mod_base = cm
  modified_base 17: mod_base = cm
  modified_base 18: mod_base = OTHER; note = 2'-O-methyl-adenosine
  modified_base 19: mod_base = cm
  misc_feature 20..22: note = linked via phosphorothioate
  modified_base 20: mod_base = um
  modified_base 21: mod_base = gm
  modified_base 22: mod_base = gm
  source 1..22: mol_type = other RNA
taaactgagtttcatccactgg

SEQ ID NO: 277 - RNA, 22 nt, synthetic construct
  misc_feature 1..4: note = linked via phosphorothioate
  modified_base 1: mod_base = OTHER; note = 4'-O-monomethylphosphonate-2'-O-methylmethyluridine
  modified_base 2: mod_base = OTHER; note = 2'-Fluoro-adenosine
  modified_base 3: mod_base = OTHER; note = 2'-Fluoro-adenosine
  modified_base 4: mod_base = OTHER; note = 2'-Fluoro-adenosine
  modified_base 5: mod_base = OTHER; note = 2'-Fluoro-cytidine
  modified_base 6: mod_base = um
  modified_base 7: mod_base = OTHER; note = 2'-Fluoro-guanosine
  modified_base 8: mod_base = OTHER; note = 2'-O-methyl-adenosine
  modified_base 9: mod_base = gm
  modified_base 10: mod_base = OTHER; note = 2'-Fluoro-uridine
  modified_base 11: mod_base = um
  modified_base 12: mod_base = um
  modified_base 13: mod_base = cm
  modified_base 14: mod_base = OTHER; note = 2'-Fluoro-adenosine
  modified_base 15: mod_base = um
  modified_base 16: mod_base = cm
  modified_base 17: mod_base = cm
  modified_base 18: mod_base = OTHER; note = 2'-O-methyl-adenosine
  modified_base 19: mod_base = cm
  misc_feature 20..22: note = linked via phosphorothioate
  modified_base 20: mod_base = um
  modified_base 21: mod_base = gm
  modified_base 22: mod_base = gm
  source 1..22: mol_type = other RNA
taaactgagtttcatccactgg

SEQ ID NO: 278 - RNA, 20 nt, synthetic construct
  source 1..20: mol_type = other RNA
agttgaattatcagcttaaa

SEQ ID NO: 279 - RNA, 20 nt, synthetic construct
  source 1..20: mol_type = other RNA
accatcaaggtgaagttcaa

SEQ ID NO: 280 - RNA, 20 nt, synthetic construct
  source 1..20: mol_type = other RNA
agaaaaaaattgaaatgtaa

SEQ ID NO: 281 - RNA, 20 nt, synthetic construct
  source 1..20: mol_type = other RNA
agtggatgaaactcagttta

SEQ ID NO: 282 - RNA, 18 nt, synthetic construct
  source 1..18: mol_type = other RNA
agttgaattatcagctta

SEQ ID NO: 283 - RNA, 18 nt, synthetic construct
  source 1..18: mol_type = other RNA
accatcaaggtgaagttc

SEQ ID NO: 284 - RNA, 18 nt, synthetic construct
  source 1..18: mol_type = other RNA
agaaaaaaattgaaatgt

SEQ ID NO: 285 - RNA, 18 nt, synthetic construct
  source 1..18: mol_type = other RNA
agtggatgaaactcagtt

SEQ ID NO: 286 - RNA, 22 nt, synthetic construct
  source 1..22: mol_type = other RNA
tttaagctgataattcaactgg

SEQ ID NO: 287 - RNA, 22 nt, synthetic construct
  source 1..22: mol_type = other RNA
ttgaacttcaccttgatggtgg

SEQ ID NO: 288 - RNA, 22 nt, synthetic construct
  source 1..22: mol_type = other RNA
ttacatttcaatttttttctgg

SEQ ID NO: 289 - RNA, 22 nt, synthetic construct
  source 1..22: mol_type = other RNA
taaactgagtttcatccactgg

SEQ ID NO: 290 - RNA, 22 nt, synthetic construct
  source 1..22: mol_type = other RNA
tttaagctgataattcaactgg

SEQ ID NO: 291 - RNA, 22 nt, synthetic construct
  source 1..22: mol_type = other RNA
ttgaacttcaccttgatggtgg

SEQ ID NO: 292 - RNA, 22 nt, synthetic construct
  source 1..22: mol_type = other RNA
ttacatttcaatttttttctgg

SEQ ID NO: 293 - RNA, 22 nt, synthetic construct
  source 1..22: mol_type = other RNA
taaactgagtttcatccactgg

SEQ ID NO: 294 - RNA, 20 nt, synthetic construct
  misc_feature 1^2: note = linked via phosphorothioate
  modified_base 1: mod_base = OTHER; note = docosanamidodiethoxymethanol-adenosine
  modified_base 2: mod_base = gm
  modified_base 3: mod_base = um
  modified_base 4: mod_base = um
  modified_base 5: mod_base = gm
  modified_base 6: mod_base = OTHER; note = 2'-O-methyl-adenosine
  modified_base 7: mod_base = OTHER; note = 2'-O-methyl-adenosine
  modified_base 8: mod_base = OTHER; note = 2'-Fluoro-uridine
  modified_base 9: mod_base = OTHER; note = 2'-Fluoro-uridine
  modified_base 10: mod_base = OTHER; note = 2'-Fluoro-adenosine
  modified_base 11: mod_base = OTHER; note = 2'-Fluoro-uridine
  modified_base 12: mod_base = cm
  modified_base 13: mod_base = OTHER; note = 2'-O-methyl-adenosine
  modified_base 14: mod_base = gm
  modified_base 15: mod_base = cm
  modified_base 16: mod_base = um
  modified_base 17: mod_base = um
  misc_feature 18..20: note = linked via phosphorothioate
  modified_base 18: mod_base = OTHER; note = 2'-O-methyl-adenosine
  modified_base 19: mod_base = OTHER; note = 2'-O-methyl-adenosine
  modified_base 20: mod_base = OTHER; note = 2'-O-methyl-adenosine
  source 1..20: mol_type = other RNA
agttgaattatcagcttaaa

SEQ ID NO: 295 - RNA, 20 nt, synthetic construct
  misc_feature 1^2: note = linked via phosphorothioate
  modified_base 1: mod_base = OTHER; note = docosanamidodiethoxymethanol-adenosine
  modified_base 2: mod_base = cm
  modified_base 3: mod_base = cm
  modified_base 4: mod_base = OTHER; note = 2'-O-methyl-adenosine
  modified_base 5: mod_base = um
  modified_base 6: mod_base = cm
  modified_base 7: mod_base = OTHER; note = 2'-O-methyl-adenosine
  modified_base 8: mod_base = OTHER; note = 2'-Fluoro-adenosine
  modified_base 9: mod_base = OTHER; note = 2'-Fluoro-guanosine
  modified_base 10: mod_base = OTHER; note = 2'-Fluoro-guanosine
  modified_base 11: mod_base = OTHER; note = 2'-Fluoro-uridine
  modified_base 12: mod_base = gm
  modified_base 13: mod_base = OTHER; note = 2'-O-methyl-adenosine
  modified_base 14: mod_base = OTHER; note = 2'-O-methyl-adenosine
  modified_base 15: mod_base = gm
  modified_base 16: mod_base = um
  modified_base 17: mod_base = um
  misc_feature 18..20: note = linked via phosphorothioate
  modified_base 18: mod_base = cm
  modified_base 19: mod_base = OTHER; note = 2'-O-methyl-adenosine
  modified_base 20: mod_base = OTHER; note = 2'-O-methyl-adenosine
  source 1..20: mol_type = other RNA
accatcaaggtgaagttcaa

SEQ ID NO: 296 - RNA, 20 nt, synthetic construct
  misc_feature 1^2: note = linked via phosphorothioate
  modified_base 1: mod_base = OTHER; note = docosanamidodiethoxymethanol-adenosine
  modified_base 2: mod_base = gm
  modified_base 3: mod_base = OTHER; note = 2'-O-methyl-adenosine
  modified_base 4: mod_base = OTHER; note = 2'-O-methyl-adenosine
  modified_base 5: mod_base = OTHER; note = 2'-O-methyl-adenosine
  modified_base 6: mod_base = OTHER; note = 2'-O-methyl-adenosine
  modified_base 7: mod_base = OTHER; note = 2'-O-methyl-adenosine
  modified_base 8: mod_base = OTHER; note = 2'-Fluoro-adenosine
  modified_base 9: mod_base = OTHER; note = 2'-Fluoro-adenosine
  modified_base 10: mod_base = OTHER; note = 2'-Fluoro-uridine
  modified_base 11: mod_base = OTHER; note = 2'-Fluoro-uridine
  modified_base 12: mod_base = gm
  modified_base 13: mod_base = OTHER; note = 2'-O-methyl-adenosine
  modified_base 14: mod_base = OTHER; note = 2'-O-methyl-adenosine
  modified_base 15: mod_base = OTHER; note = 2'-O-methyl-adenosine
  modified_base 16: mod_base = um
  modified_base 17: mod_base = gm
  misc_feature 18..20: note = linked via phosphorothioate
  modified_base 18: mod_base = um
  modified_base 19: mod_base = OTHER; note = 2'-O-methyl-adenosine
  modified_base 20: mod_base = OTHER; note = 2'-O-methyl-adenosine
  source 1..20: mol_type = other RNA
agaaaaaaattgaaatgtaa

SEQ ID NO: 297 - RNA, 20 nt, synthetic construct
  misc_feature 1^2: note = linked via phosphorothioate
  modified_base 1: mod_base = OTHER; note = docosanamidodiethoxymethanol-adenosine
  modified_base 2: mod_base = gm
  modified_base 3: mod_base = um
  modified_base 4: mod_base = gm
  modified_base 5: mod_base = gm
  modified_base 6: mod_base = OTHER; note = 2'-O-methyl-adenosine
  modified_base 7: mod_base = um
  modified_base 8: mod_base = OTHER; note = 2'-Fluoro-guanosine
  modified_base 9: mod_base = OTHER; note = 2'-Fluoro-adenosine
  modified_base 10: mod_base = OTHER; note = 2'-Fluoro-adenosine
  modified_base 11: mod_base = OTHER; note = 2'-Fluoro-adenosine
  modified_base 12: mod_base = cm
  modified_base 13: mod_base = um
  modified_base 14: mod_base = cm
  modified_base 15: mod_base = OTHER; note = 2'-O-methyl-adenosine
  modified_base 16: mod_base = gm
  modified_base 17: mod_base = um
  misc_feature 18..20: note = linked via phosphorothioate
  modified_base 18: mod_base = um
  modified_base 19: mod_base = um
  modified_base 20: mod_base = OTHER; note = 2'-O-methyl-adenosine
  source 1..20: mol_type = other RNA
agtggatgaaactcagttta

SEQ ID NO: 298 - RNA, 18 nt, synthetic construct
  misc_feature 1^2: note = linked via phosphorothioate
  modified_base 1: mod_base = OTHER; note = docosanamidodiethoxymethanol-adenosine
  modified_base 2: mod_base = gm
  modified_base 3: mod_base = um
  modified_base 4: mod_base = um
  modified_base 5: mod_base = gm
  modified_base 6: mod_base = OTHER; note = 2'-O-methyl-adenosine
  modified_base 7: mod_base = OTHER; note = 2'-O-methyl-adenosine
  modified_base 8: mod_base = OTHER; note = 2'-Fluoro-uridine
  modified_base 9: mod_base = OTHER; note = 2'-Fluoro-uridine
  modified_base 10: mod_base = OTHER; note = 2'-Fluoro-adenosine
  modified_base 11: mod_base = OTHER; note = 2'-Fluoro-uridine
  modified_base 12: mod_base = cm
  modified_base 13: mod_base = OTHER; note = 2'-O-methyl-adenosine
  modified_base 14: mod_base = gm
  modified_base 15: mod_base = cm
  misc_feature 16..18: note = linked via phosphorothioate
  modified_base 16: mod_base = um
  modified_base 17: mod_base = um
  modified_base 18: mod_base = OTHER; note = 2'-O-methyl-adenosine
  source 1..18: mol_type = other RNA
agttgaattatcagctta

SEQ ID NO: 299 - RNA, 18 nt, synthetic construct
  misc_feature 1^2: note = linked via phosphorothioate
  modified_base 1: mod_base = OTHER; note = docosanamidodiethoxymethanol-adenosine
  modified_base 2: mod_base = cm
  modified_base 3: mod_base = cm
  modified_base 4: mod_base = OTHER; note = 2'-O-methyl-adenosine
  modified_base 5: mod_base = um
  modified_base 6: mod_base = cm
  modified_base 7: mod_base = OTHER; note = 2'-O-methyl-adenosine
  modified_base 8: mod_base = OTHER; note = 2'-Fluoro-adenosine
  modified_base 9: mod_base = OTHER; note = 2'-Fluoro-guanosine
  modified_base 10: mod_base = OTHER; note = 2'-Fluoro-guanosine
  modified_base 11: mod_base = OTHER; note = 2'-Fluoro-uridine
  modified_base 12: mod_base = gm
  modified_base 13: mod_base = OTHER; note = 2'-O-methyl-adenosine
  modified_base 14: mod_base = OTHER; note = 2'-O-methyl-adenosine
  modified_base 15: mod_base = gm
  misc_feature 16..18: note = linked via phosphorothioate
  modified_base 16: mod_base = um
  modified_base 17: mod_base = um
  modified_base 18: mod_base = cm
  source 1..18: mol_type = other RNA
accatcaaggtgaagttc

SEQ ID NO: 300 - RNA, 18 nt, synthetic construct
  misc_feature 1^2: note = linked via phosphorothioate
  modified_base 1: mod_base = OTHER; note = docosanamidodiethoxymethanol-adenosine
  modified_base 2: mod_base = gm
  modified_base 3: mod_base = OTHER; note = 2'-O-methyl-adenosine
  modified_base 4: mod_base = OTHER; note = 2'-O-methyl-adenosine
  modified_base 5: mod_base = OTHER; note = 2'-O-methyl-adenosine
  modified_base 6: mod_base = OTHER; note = 2'-O-methyl-adenosine
  modified_base 7: mod_base = OTHER; note = 2'-O-methyl-adenosine
  modified_base 8: mod_base = OTHER; note = 2'-Fluoro-adenosine
  modified_base 9: mod_base = OTHER; note = 2'-Fluoro-adenosine
  modified_base 10: mod_base = OTHER; note = 2'-Fluoro-uridine
  modified_base 11: mod_base = OTHER; note = 2'-Fluoro-uridine
  modified_base 12: mod_base = gm
  modified_base 13: mod_base = OTHER; note = 2'-O-methyl-adenosine
  modified_base 14: mod_base = OTHER; note = 2'-O-methyl-adenosine
  modified_base 15: mod_base = OTHER; note = 2'-O-methyl-adenosine
  misc_feature 16..18: note = linked via phosphorothioate
  modified_base 16: mod_base = um
  modified_base 17: mod_base = gm
  modified_base 18: mod_base = um
  source 1..18: mol_type = other RNA
agaaaaaaattgaaatgt

SEQ ID NO: 301 - RNA, 18 nt, synthetic construct
  misc_feature 1^2: note = linked via phosphorothioate
  modified_base 1: mod_base = OTHER; note = docosanamidodiethoxymethanol-adenosine
  modified_base 2: mod_base = gm
  modified_base 3: mod_base = um
  modified_base 4: mod_base = gm
  modified_base 5: mod_base = gm
  modified_base 6: mod_base = OTHER; note = 2'-O-methyl-adenosine
  modified_base 7: mod_base = um
  modified_base 8: mod_base = OTHER; note = 2'-Fluoro-guanosine
  modified_base 9: mod_base = OTHER; note = 2'-Fluoro-adenosine
  modified_base 10: mod_base = OTHER; note = 2'-Fluoro-adenosine
  modified_base 11: mod_base = OTHER; note = 2'-Fluoro-adenosine
  modified_base 12: mod_base = cm
  modified_base 13: mod_base = um
  modified_base 14: mod_base = cm
  modified_base 15: mod_base = OTHER; note = 2'-O-methyl-adenosine
  misc_feature 16..18: note = linked via phosphorothioate
  modified_base 16: mod_base = gm
  modified_base 17: mod_base = um
  modified_base 18: mod_base = um
  source 1..18: mol_type = other RNA
agtggatgaaactcagtt

SEQ ID NO: 302 - RNA, 22 nt, synthetic construct
  misc_feature 1..4: note = linked via phosphorothioate
  modified_base 1: mod_base = OTHER; note = 4'-O-monomethylphosphonate-2'-O-methylmethyluridine
  modified_base 2: mod_base = OTHER; note = 2'-Fluoro-uridine
  modified_base 3: mod_base = OTHER; note = 2'-Fluoro-uridine
  modified_base 4: mod_base = OTHER; note = 2'-Fluoro-adenosine
  modified_base 5: mod_base = OTHER; note = 2'-Fluoro-adenosine
  modified_base 6: mod_base = gm
  modified_base 7: mod_base = OTHER; note = 2'-Fluoro-cytidine
  modified_base 8: mod_base = um
  modified_base 9: mod_base = gm
  modified_base 10: mod_base = OTHER; note = 2'-Fluoro-adenosine
  modified_base 11: mod_base = um
  modified_base 12: mod_base = OTHER; note = 2'-O-methyl-adenosine
  modified_base 13: mod_base = OTHER; note = 2'-O-methyl-adenosine
  modified_base 14: mod_base = OTHER; note = 2'-Fluoro-uridine
  modified_base 15: mod_base = um
  modified_base 16: mod_base = cm
  modified_base 17: mod_base = OTHER; note = 2'-O-methyl-adenosine
  modified_base 18: mod_base = OTHER; note = 2'-O-methyl-adenosine
  modified_base 19: mod_base = cm
  misc_feature 20..22: note = linked via phosphorothioate
  modified_base 20: mod_base = um
  modified_base 21: mod_base = gm
  modified_base 22: mod_base = gm
  source 1..22: mol_type = other RNA
tttaagctgataattcaactgg

SEQ ID NO: 303 - RNA, 22 nt, synthetic construct
  misc_feature 1..4: note = linked via phosphorothioate
  modified_base 1: mod_base = OTHER; note = 4'-O-monomethylphosphonate-2'-O-methylmethyluridine
  modified_base 2: mod_base = OTHER; note = 2'-Fluoro-uridine
  modified_base 3: mod_base = OTHER; note = 2'-Fluoro-guanosine
  modified_base 4: mod_base = OTHER; note = 2'-Fluoro-adenosine
  modified_base 5: mod_base = OTHER; note = 2'-Fluoro-adenosine
  modified_base 6: mod_base = cm
  modified_base 7: mod_base = OTHER; note = 2'-Fluoro-uridine
  modified_base 8: mod_base = um
  modified_base 9: mod_base = cm
  modified_base 10: mod_base = OTHER; note = 2'-Fluoro-adenosine
  modified_base 11: mod_base = cm
  modified_base 12: mod_base = cm
  modified_base 13: mod_base = um
  modified_base 14: mod_base = OTHER; note = 2'-Fluoro-uridine
  modified_base 15: mod_base = gm
  modified_base 16: mod_base = OTHER; note = 2'-O-methyl-adenosine
  modified_base 17: mod_base = um
  modified_base 18: mod_base = gm
  modified_base 19: mod_base = gm
  misc_feature 20..22: note = linked via phosphorothioate
  modified_base 20: mod_base = um
  modified_base 21: mod_base = gm
  modified_base 22: mod_base = gm
  source 1..22: mol_type = other RNA
ttgaacttcaccttgatggtgg

SEQ ID NO: 304 - RNA, 22 nt, synthetic construct
  misc_feature 1..4: note = linked via phosphorothioate
  modified_base 1: mod_base = OTHER; note = 4'-O-monomethylphosphonate-2'-O-methylmethyluridine
  modified_base 2: mod_base = OTHER; note = 2'-Fluoro-uridine
  modified_base 3: mod_base = OTHER; note = 2'-Fluoro-adenosine
  modified_base 4: mod_base = OTHER; note = 2'-Fluoro-cytidine
  modified_base 5: mod_base = OTHER; note = 2'-Fluoro-adenosine
  modified_base 6: mod_base = um
  modified_base 7: mod_base = OTHER; note = 2'-Fluoro-uridine
  modified_base 8: mod_base = um
  modified_base 9: mod_base = cm
  modified_base 10: mod_base = OTHER; note = 2'-Fluoro-adenosine
  modified_base 11: mod_base = OTHER; note = 2'-O-methyl-adenosine
  modified_base 12: mod_base = um
  modified_base 13: mod_base = um
  modified_base 14: mod_base = OTHER; note = 2'-Fluoro-uridine
  modified_base 15: mod_base = um
  modified_base 16: mod_base = um
  modified_base 17: mod_base = um
  modified_base 18: mod_base = um
  modified_base 19: mod_base = cm
  misc_feature 20..22: note = linked via phosphorothioate
  modified_base 20: mod_base = um
  modified_base 21: mod_base = gm
  modified_base 22: mod_base = gm
  source 1..22: mol_type = other RNA
ttacatttcaatttttttctgg

SEQ ID NO: 305 - RNA, 22 nt, synthetic construct
  misc_feature 1..4: note = linked via phosphorothioate
  modified_base 1: mod_base = OTHER; note = 4'-O-monomethylphosphonate-2'-O-methylmethyluridine
  modified_base 2: mod_base = OTHER; note = 2'-Fluoro-adenosine
  modified_base 3: mod_base = OTHER; note = 2'-Fluoro-adenosine
  modified_base 4: mod_base = OTHER; note = 2'-Fluoro-adenosine
  modified_base 5: mod_base = OTHER; note = 2'-Fluoro-cytidine
  modified_base 6: mod_base = um
  modified_base 7: mod_base = OTHER; note = 2'-Fluoro-guanosine
  modified_base 8: mod_base = OTHER; note = 2'-O-methyl-adenosine
  modified_base 9: mod_base = gm
  modified_base 10: mod_base = OTHER; note = 2'-Fluoro-uridine
  modified_base 11: mod_base = um
  modified_base 12: mod_base = um
  modified_base 13: mod_base = cm
  modified_base 14: mod_base = OTHER; note = 2'-Fluoro-adenosine
  modified_base 15: mod_base = um
  modified_base 16: mod_base = cm
  modified_base 17: mod_base = cm
  modified_base 18: mod_base = OTHER; note = 2'-O-methyl-adenosine
  modified_base 19: mod_base = cm
  misc_feature 20..22: note = linked via phosphorothioate
  modified_base 20: mod_base = um
  modified_base 21: mod_base = gm
  modified_base 22: mod_base = gm
  source 1..22: mol_type = other RNA
taaactgagtttcatccactgg

SEQ ID NO: 306 - RNA, 22 nt, synthetic construct
  misc_feature 1..4: note = linked via phosphorothioate
  modified_base 1: mod_base = OTHER; note = 4'-O-monomethylphosphonate-2'-O-methylmethyluridine
  modified_base 2: mod_base = OTHER; note = 2'-Fluoro-uridine
  modified_base 3: mod_base = OTHER; note = 2'-Fluoro-uridine
  modified_base 4: mod_base = OTHER; note = 2'-Fluoro-adenosine
  modified_base 5: mod_base = OTHER; note = 2'-Fluoro-adenosine
  modified_base 6: mod_base = gm
  modified_base 7: mod_base = OTHER; note = 2'-Fluoro-cytidine
  modified_base 8: mod_base = um
  modified_base 9: mod_base = gm
  modified_base 10: mod_base = OTHER; note = 2'-Fluoro-adenosine
  modified_base 11: mod_base = um
  modified_base 12: mod_base = OTHER; note = 2'-O-methyl-adenosine
  modified_base 13: mod_base = OTHER; note = 2'-O-methyl-adenosine
  modified_base 14: mod_base = OTHER; note = 2'-Fluoro-uridine
  modified_base 15: mod_base = um
  modified_base 16: mod_base = cm
  modified_base 17: mod_base = OTHER; note = 2'-O-methyl-adenosine
  modified_base 18: mod_base = OTHER; note = 2'-O-methyl-adenosine
  modified_base 19: mod_base = cm
  misc_feature 20..22: note = linked via phosphorothioate
  modified_base 20: mod_base = um
  modified_base 21: mod_base = gm
  modified_base 22: mod_base = gm
  source 1..22: mol_type = other RNA
tttaagctgataattcaactgg

SEQ ID NO: 307 - RNA, 22 nt, synthetic construct
  misc_feature 1..4: note = linked via phosphorothioate
  modified_base 1: mod_base = OTHER; note = 4'-O-monomethylphosphonate-2'-O-methylmethyluridine
  modified_base 2: mod_base = OTHER; note = 2'-Fluoro-uridine
  modified_base 3: mod_base = OTHER; note = 2'-Fluoro-guanosine
  modified_base 4: mod_base = OTHER; note = 2'-Fluoro-adenosine
  modified_base 5: mod_base = OTHER; note = 2'-Fluoro-adenosine
  modified_base 6: mod_base = cm
  modified_base 7: mod_base = OTHER; note = 2'-Fluoro-uridine
  modified_base 8: mod_base = um
  modified_base 9: mod_base = cm
  modified_base 10: mod_base = OTHER; note = 2'-Fluoro-adenosine
  modified_base 11: mod_base = cm
  modified_base 12: mod_base = cm
  modified_base 13: mod_base = um
  modified_base 14: mod_base = OTHER; note = 2'-Fluoro-uridine
  modified_base 15: mod_base = gm
  modified_base 16: mod_base = OTHER; note = 2'-O-methyl-adenosine
  modified_base 17: mod_base = um
  modified_base 18: mod_base = gm
  modified_base 19: mod_base = gm
  misc_feature 20..22: note = linked via phosphorothioate
  modified_base 20: mod_base = um
  modified_base 21: mod_base = gm
  modified_base 22: mod_base = gm
  source 1..22: mol_type = other RNA
ttgaacttcaccttgatggtgg

SEQ ID NO: 308 - RNA, 22 nt, synthetic construct
  misc_feature 1..4: note = linked via phosphorothioate
  modified_base 1: mod_base = OTHER; note = 4'-O-monomethylphosphonate-2'-O-methylmethyluridine
  modified_base 2: mod_base = OTHER; note = 2'-Fluoro-uridine
  modified_base 3: mod_base = OTHER; note = 2'-Fluoro-adenosine
  modified_base 4: mod_base = OTHER; note = 2'-Fluoro-cytidine
  modified_base 5: mod_base = OTHER; note = 2'-Fluoro-adenosine
  modified_base 6: mod_base = um
  modified_base 7: mod_base = OTHER; note = 2'-Fluoro-uridine
  modified_base 8: mod_base = um
  modified_base 9: mod_base = cm
  modified_base 10: mod_base = OTHER; note = 2'-Fluoro-adenosine
  modified_base 11: mod_base = OTHER; note = 2'-O-methyl-adenosine
  modified_base 12: mod_base = um
  modified_base 13: mod_base = um
  modified_base 14: mod_base = OTHER; note = 2'-Fluoro-uridine
  modified_base 15: mod_base = um
  modified_base 16: mod_base = um
  modified_base 17: mod_base = um
  modified_base 18: mod_base = um
  modified_base 19: mod_base = cm
  misc_feature 20..22: note = linked via phosphorothioate
  modified_base 20: mod_base = um
  modified_base 21: mod_base = gm
  modified_base 22: mod_base = gm
  source 1..22: mol_type = other RNA
ttacatttcaatttttttctgg

SEQ ID NO: 309 - RNA, 22 nt, synthetic construct
  misc_feature 1..4: note = linked via phosphorothioate
  modified_base 1: mod_base = OTHER; note = 4'-O-monomethylphosphonate-2'-O-methylmethyluridine
  modified_base 2: mod_base = OTHER; note = 2'-Fluoro-adenosine
  modified_base 3: mod_base = OTHER; note = 2'-Fluoro-adenosine
  modified_base 4: mod_base = OTHER; note = 2'-Fluoro-adenosine
  modified_base 5: mod_base = OTHER; note = 2'-Fluoro-cytidine
  modified_base 6: mod_base = um
  modified_base 7: mod_base = OTHER; note = 2'-Fluoro-guanosine
  modified_base 8: mod_base = OTHER; note = 2'-O-methyl-adenosine
  modified_base 9: mod_base = gm
  modified_base 10: mod_base = OTHER; note = 2'-Fluoro-uridine
  modified_base 11: mod_base = um
  modified_base 12: mod_base = um
  modified_base 13: mod_base = cm
  modified_base 14: mod_base = OTHER; note = 2'-Fluoro-adenosine
  modified_base 15: mod_base = um
  modified_base 16: mod_base = cm
  modified_base 17: mod_base = cm
  modified_base 18: mod_base = OTHER; note = 2'-O-methyl-adenosine
  modified_base 19: mod_base = cm
  misc_feature 20..22: note = linked via phosphorothioate
  modified_base 20: mod_base = um
  modified_base 21: mod_base = gm
  modified_base 22: mod_base = gm
  source 1..22: mol_type = other RNA
taaactgagtttcatccactgg

SEQ ID NO: 310 - RNA, 36 nt, synthetic construct
  source 1..36: mol_type = other RNA
agtgtgagaattgtgactgagcagccgaaaggctgc

SEQ ID NO: 311 - RNA, 38 nt, synthetic construct
  source 1..38: mol_type = other RNA
gcagccgaaaggctgcccagtgtgagaattgtgactga

SEQ ID NO: 312 - RNA, 34 nt, synthetic construct
  source 1..34: mol_type = other RNA
gcacgaaagtgcccagtgtgagaattgtgactga

SEQ ID NO: 313 - RNA, 34 nt, synthetic construct; identical to SEQ ID NO: 312
  source 1..34: mol_type = other RNA

SEQ ID NO: 314 - RNA, 34 nt, synthetic construct; identical to SEQ ID NO: 312
  source 1..34: mol_type = other RNA

SEQ ID NO: 315 - RNA, 34 nt, synthetic construct
  source 1..34: mol_type = other RNA
gcactacggtgcccagtgtgagaattgtgactga

SEQ ID NO: 316 - RNA, 30 nt, synthetic construct
  source 1..30: mol_type = other RNA
gctacggcccagtgtgagaattgtgactga

SEQ ID NO: 317 - RNA, 30 nt, synthetic construct; identical to SEQ ID NO: 316
  source 1..30: mol_type = other RNA

SEQ ID NO: 318 - RNA, 28 nt, synthetic construct
  source 1..28: mol_type = other RNA
gctacggcccagtgtgagaattgtgact

SEQ ID NO: 319 - RNA, 38 nt, synthetic construct; identical to SEQ ID NO: 311
  source 1..38: mol_type = other RNA

SEQ ID NO: 320 - RNA, 34 nt, synthetic construct; identical to SEQ ID NO: 312
  source 1..34: mol_type = other RNA

SEQ ID NO: 321 - RNA, 34 nt, synthetic construct; identical to SEQ ID NO: 312
  source 1..34: mol_type = other RNA

SEQ ID NO: 322 - DNA, 34 bp, synthetic construct
  misc_feature 1..9: note = RNA fragment
  misc_feature 10: note = DNA fragment
  misc_feature 11..34: note = RNA fragment
  source 1..34: mol_type = other DNA
gcacgaaagtgcccagtgtgagaattgtgactga

SEQ ID NO: 323 - RNA, 30 nt, synthetic construct; identical to SEQ ID NO: 316
  source 1..30: mol_type = other RNA

SEQ ID NO: 324 - RNA, 22 nt, synthetic construct
  source 1..22: mol_type = other RNA
tcagtcacaattctcacactgg

SEQ ID NO: 325 - RNA, 22 nt, synthetic construct
  source 1..22: mol_type = other RNA
tcagtcacaattctcacactgg

SEQ ID NO: 326 - RNA, 22 nt, synthetic construct
  source 1..22: mol_type = other RNA
tcagtcacaattctcacactgg

SEQ ID NO: 327 - RNA, 22 nt, synthetic construct
  source 1..22: mol_type = other RNA
tcagtcacaattctcacactgg

SEQ ID NO: 328 - RNA, 22 nt, synthetic construct
  source 1..22: mol_type = other RNA
tcagtcacaattctcacactgg

SEQ ID NO: 329 - RNA, 22 nt, synthetic construct
  source 1..22: mol_type = other RNA
tcagtcacaattctcacactgg

SEQ ID NO: 330 - RNA, 22 nt, synthetic construct
  source 1..22: mol_type = other RNA
tcagtcacaattctcacactgg

SEQ ID NO: 331 - RNA, 22 nt, synthetic construct
  source 1..22: mol_type = other RNA
tcagtcacaattctcacactgg

SEQ ID NO: 332 - RNA, 22 nt, synthetic construct
  source 1..22: mol_type = other RNA
tcagtcacaattctcacactgg

SEQ ID NO: 333 - RNA, 22 nt, synthetic construct
  source 1..22: mol_type = other RNA
tcagtcacaattctcacactgg

SEQ ID NO: 334 - RNA, 22 nt, synthetic construct
  source 1..22: mol_type = other RNA
tcagtcacaattctcacactgg

SEQ ID NO: 335 - RNA, 22 nt, synthetic construct
  source 1..22: mol_type = other RNA
tcagtcacaattctcacactgg

SEQ ID NO: 336 - RNA, 22 nt, synthetic construct
  source 1..22: mol_type = other RNA
tcagtcacaattctcacactgg

SEQ ID NO: 337 - RNA, 22 nt, synthetic construct
  source 1..22: mol_type = other RNA
tcagtcacaattctcacactgg

SEQ ID NO: 338 - RNA, 36 nt, synthetic construct; identical to SEQ ID NO: 310
  misc_feature 1^2: note = linked via phosphorothioate
  modified_base 1: mod_base = OTHER; note = 2'-O-methyl-adenosine
  modified_base 2: mod_base = gm
  modified_base 3: mod_base = um
  modified_base 4: mod_base = gm
  modified_base 5: mod_base = um
  modified_base 6: mod_base = gm
  modified_base 7: mod_base = OTHER; note = 2'-O-methyl-adenosine
  modified_base 8: mod_base = OTHER; note = 2'-Fluoro-guanosine
  modified_base 9: mod_base = OTHER; note = 2'-Fluoro-adenosine
  modified_base 10: mod_base = OTHER; note = 2'-Fluoro-adenosine
  modified_base 11: mod_base = OTHER; note = 2'-Fluoro-uridine
  modified_base 12: mod_base = um
  modified_base 13: mod_base = gm
  modified_base 14: mod_base = um
  modified_base 15: mod_base = gm
  modified_base 16: mod_base = OTHER; note = 2'-O-methyl-adenosine
  modified_base 17: mod_base = cm
  modified_base 18: mod_base = um
  modified_base 19: mod_base = gm
  modified_base 20: mod_base = OTHER; note = 2'-O-methyl-adenosine
  modified_base 21: mod_base = gm
  modified_base 22: mod_base = cm
  modified_base 23: mod_base = OTHER; note = 2'-O-methyl-adenosine
  modified_base 24: mod_base = gm
  modified_base 25: mod_base = cm
  modified_base 26: mod_base = cm
  modified_base 27: mod_base = gm
  modified_base 28: mod_base = OTHER; note = hexadecanamidodiethoxymethanol-adenosine
  modified_base 29: mod_base = OTHER; note = 2'-O-methyl-adenosine
  modified_base 30: mod_base = OTHER; note = 2'-O-methyl-adenosine
  modified_base 31: mod_base = gm
  modified_base 32: mod_base = gm
  modified_base 33: mod_base = cm
  modified_base 34: mod_base = um
  modified_base 35: mod_base = gm
  modified_base 36: mod_base = cm
  source 1..36: mol_type = other RNA

SEQ ID NO: 339 - RNA, 38 nt, synthetic construct; identical to SEQ ID NO: 311
  modified_base 1: mod_base = gm
  modified_base 2: mod_base = cm
  modified_base 3: mod_base = OTHER; note = 2'-O-methyl-adenosine
  modified_base 4: mod_base = gm
  modified_base 5: mod_base = cm
  modified_base 6: mod_base = cm
  modified_base 7: mod_base = gm
  modified_base 8: mod_base = OTHER; note = hexadecanamidodiethoxymethanol-adenosine
  modified_base 9: mod_base = OTHER; note = 2'-O-methyl-adenosine
  modified_base 10: mod_base = OTHER; note = 2'-O-methyl-adenosine
  modified_base 11: mod_base = gm
  modified_base 12: mod_base = gm
  modified_base 13: mod_base = cm
  modified_base 14: mod_base = um
  modified_base 15: mod_base = gm
  modified_base 16: mod_base = cm
  modified_base 17: mod_base = cm
  modified_base 18: mod_base = cm
  modified_base 19: mod_base = OTHER; note = 2'-O-methyl-adenosine
  modified_base 20: mod_base = gm
  modified_base 21: mod_base = um
  modified_base 22: mod_base = gm
  modified_base 23: mod_base = um
  modified_base 24: mod_base = gm
  modified_base 25: mod_base = OTHER; note = 2'-O-methyl-adenosine
  modified_base 26: mod_base = OTHER; note = 2'-Fluoro-guanosine
  modified_base 27: mod_base = OTHER; note = 2'-Fluoro-adenosine
  modified_base 28: mod_base = OTHER; note = 2'-Fluoro-adenosine
  modified_base 29: mod_base = OTHER; note = 2'-Fluoro-uridine
  modified_base 30: mod_base = um
  modified_base 31: mod_base = gm
  modified_base 32: mod_base = um
  modified_base 33: mod_base = gm
  modified_base 34: mod_base = OTHER; note = 2'-O-methyl-adenosine
  modified_base 35: mod_base = cm
  misc_feature 36..38: note = linked via phosphorothioate
  modified_base 36: mod_base = um
  modified_base 37: mod_base = gm
  modified_base 38: mod_base = OTHER; note = 2'-O-methyl-adenosine
  source 1..38: mol_type = other RNA

SEQ ID NO: 340 - RNA, 34 nt, synthetic construct; identical to SEQ ID NO: 312
  modified_base 1: mod_base = gm
  modified_base 2: mod_base = cm
  modified_base 3: mod_base = OTHER; note = 2'-O-methyl-adenosine
  modified_base 4: mod_base = cm
  modified_base 5: mod_base = gm
  modified_base 6: mod_base = OTHER; note = hexadecanamidodiethoxymethanol-adenosine
  modified_base 7: mod_base = OTHER; note = 2'-O-methyl-adenosine
  modified_base 8: mod_base = OTHER; note = 2'-O-methyl-adenosine
  modified_base 9: mod_base = gm
  modified_base 10: mod_base = um
  modified_base 11: mod_base = gm
  modified_base 12: mod_base = cm
  modified_base 13: mod_base = cm
  modified_base 14: mod_base = cm
  modified_base 15: mod_base = OTHER; note = 2'-O-methyl-adenosine
  modified_base 16: mod_base = gm
  modified_base 17: mod_base = um
  modified_base 18: mod_base = gm
  modified_base 19: mod_base = um
  modified_base 20: mod_base = gm
  modified_base 21: mod_base = OTHER; note = 2'-O-methyl-adenosine
  modified_base 22: mod_base = OTHER; note = 2'-Fluoro-guanosine
  modified_base 23: mod_base = OTHER; note = 2'-Fluoro-adenosine
  modified_base 24: mod_base = OTHER; note = 2'-Fluoro-adenosine
  modified_base 25: mod_base = OTHER; note = 2'-Fluoro-uridine
  modified_base 26: mod_base = um
  modified_base 27: mod_base = gm
  modified_base 28: mod_base = um
  modified_base 29: mod_base = gm
  modified_base 30: mod_base = OTHER; note = 2'-O-methyl-adenosine
  modified_base 31: mod_base = cm
  misc_feature 32..34: note = linked via phosphorothioate
  modified_base 32: mod_base = um
  modified_base 33: mod_base = gm
  modified_base 34: mod_base = OTHER; note = 2'-O-methyl-adenosine
  source 1..34: mol_type = other RNA

SEQ ID NO: 341 - RNA, 34 nt, synthetic construct; identical to SEQ ID NO: 312
  misc_feature 1..3: note = linked via phosphorothioate
  modified_base 1: mod_base = gm
  modified_base 2: mod_base = cm
  modified_base 3: mod_base = OTHER; note = 2'-O-methyl-adenosine
  modified_base 4: mod_base = cm
  modified_base 5: mod_base = gm
  modified_base 6: mod_base = OTHER; note = hexadecanamidodiethoxymethanol-adenosine
  modified_base 7: mod_base = OTHER; note = 2'-O-methyl-adenosine
  modified_base 8: mod_base = OTHER; note = 2'-O-methyl-adenosine
  modified_base 9: mod_base = gm
  modified_base 10: mod_base = um
  modified_base 11: mod_base = gm
  modified_base 12: mod_base = cm
  modified_base 13: mod_base = cm
  modified_base 14: mod_base = cm
  modified_base 15: mod_base = OTHER; note = 2'-O-methyl-adenosine
  modified_base 16: mod_base = gm
  modified_base 17: mod_base = um
  modified_base 18: mod_base = gm
  modified_base 19: mod_base = um
  modified_base 20: mod_base = gm
  modified_base 21: mod_base = OTHER; note = 2'-O-methyl-adenosine
  modified_base 22: mod_base = OTHER; note = 2'-Fluoro-guanosine
  modified_base 23: mod_base = OTHER; note = 2'-Fluoro-adenosine
  modified_base 24: mod_base = OTHER; note = 2'-Fluoro-adenosine
  modified_base 25: mod_base = OTHER; note = 2'-Fluoro-uridine
  modified_base 26: mod_base = um
  modified_base 27: mod_base = gm
  modified_base 28: mod_base = um
  modified_base 29: mod_base = gm
  modified_base 30: mod_base = OTHER; note = 2'-O-methyl-adenosine
  modified_base 31: mod_base = cm
  misc_feature 32..34: note = linked via phosphorothioate
  modified_base 32: mod_base = um
  modified_base 33: mod_base = gm
  modified_base 34: mod_base = OTHER; note = 2'-O-methyl-adenosine
  source 1..34: mol_type = other RNA

SEQ ID NO: 342 - RNA, 34 nt, synthetic construct; identical to SEQ ID NO: 312
  modified_base 1: mod_base = gm
  modified_base 2: mod_base = cm
  modified_base 3: mod_base = OTHER; note = 2'-O-methyl-adenosine
  modified_base 4: mod_base = cm
  modified_base 5: mod_base = gm
  modified_base 6: mod_base = OTHER; note = 2'-O-methyl-adenosine
  modified_base 7: mod_base = OTHER; note = 2'-O-methyl-adenosine
  modified_base 8: mod_base = OTHER; note = 2'-O-methyl-adenosine
  modified_base 9: mod_base = gm
  modified_base 10: mod_base = um
  modified_base 11: mod_base = gm
  modified_base 12: mod_base = cm
  modified_base 13: mod_base = cm
  modified_base 14: mod_base = cm
  modified_base 15: mod_base = OTHER; note = hexadecanamidodiethoxymethanol-adenosine
  modified_base 16: mod_base = gm
  modified_base 17: mod_base = um
  modified_base 18: mod_base = gm
  modified_base 19: mod_base = um
  modified_base 20: mod_base = gm
  modified_base 21: mod_base = OTHER; note = 2'-O-methyl-adenosine
  modified_base 22: mod_base = OTHER; note = 2'-Fluoro-guanosine
  modified_base 23: mod_base = OTHER; note = 2'-Fluoro-adenosine
  modified_base 24: mod_base = OTHER; note = 2'-Fluoro-adenosine
  modified_base 25: mod_base = OTHER; note = 2'-Fluoro-uridine
  modified_base 26: mod_base = um
  modified_base 27: mod_base = gm
  modified_base 28: mod_base = um
  modified_base 29: mod_base = gm
  modified_base 30: mod_base = OTHER; note = 2'-O-methyl-adenosine
  modified_base 31: mod_base = cm
  misc_feature 32..34: note = linked via phosphorothioate
  modified_base 32: mod_base = um
  modified_base 33: mod_base = gm
  modified_base 34: mod_base = OTHER; note = 2'-O-methyl-adenosine
  source 1..34: mol_type = other RNA

SEQ ID NO: 343 - RNA, 34 nt, synthetic construct; identical to SEQ ID NO: 315
  modified_base 1: mod_base = gm
  modified_base 2: mod_base = cm
  modified_base 3: mod_base = OTHER; note = 2'-O-methyl-adenosine
  modified_base 4: mod_base = cm
  modified_base 5: mod_base = um
  modified_base 6: mod_base = OTHER; note = hexadecanamidodiethoxymethanol-adenosine
  modified_base 7: mod_base = cm
  modified_base 8: mod_base = gm
  modified_base 9: mod_base = gm
  modified_base 10: mod_base = um
  modified_base 11: mod_base = gm
  modified_base 12: mod_base = cm
  modified_base 13: mod_base = cm
  modified_base 14: mod_base = cm
  modified_base 15: mod_base = OTHER; note = 2'-O-methyl-adenosine
  modified_base 16: mod_base = gm
  modified_base 17: mod_base = um
  modified_base 18: mod_base = gm
  modified_base 19: mod_base = um
  modified_base 20: mod_base = gm
  modified_base 21: mod_base = OTHER; note = 2'-O-methyl-adenosine
  modified_base 22: mod_base = OTHER; note = 2'-Fluoro-guanosine
  modified_base 23: mod_base = OTHER; note = 2'-Fluoro-adenosine
  modified_base 24: mod_base = OTHER; note = 2'-Fluoro-adenosine
  modified_base 25: mod_base = OTHER; note = 2'-Fluoro-uridine
  modified_base 26: mod_base = um
  modified_base 27: mod_base = gm
  modified_base 28: mod_base = um
  modified_base 29: mod_base = gm
  modified_base 30: mod_base = OTHER; note = 2'-O-methyl-adenosine
  modified_base 31: mod_base = cm
  misc_feature 32..34: note = linked via phosphorothioate
  modified_base 32: mod_base = um
  modified_base 33: mod_base = gm
  modified_base 34: mod_base = OTHER; note = 2'-O-methyl-adenosine
  source 1..34: mol_type = other RNA

SEQ ID NO: 344 - RNA, 30 nt, synthetic construct; identical to SEQ ID NO: 316
  modified_base 1: mod_base = gm
  modified_base 2: mod_base = cm
  modified_base 3: mod_base = um
  modified_base 4: mod_base = OTHER; note = hexadecanamidodiethoxymethanol-adenosine
  modified_base 5: mod_base = cm
  modified_base 6: mod_base = gm
  modified_base 7: mod_base = gm
  modified_base 8: mod_base = cm
  modified_base 9: mod_base = cm
  modified_base 10: mod_base = cm
  modified_base 11: mod_base = OTHER; note = 2'-O-methyl-adenosine
  modified_base 12: mod_base = gm
  modified_base 13: mod_base = um
  modified_base 14: mod_base = gm
  modified_base 15: mod_base = um
  modified_base 16: mod_base = gm
  modified_base 17: mod_base = OTHER; note = 2'-O-methyl-adenosine
  modified_base 18: mod_base = OTHER; note = 2'-Fluoro-guanosine
  modified_base 19: mod_base = OTHER; note = 2'-Fluoro-adenosine
  modified_base 20: mod_base = OTHER; note = 2'-Fluoro-adenosine
  modified_base 21: mod_base = OTHER; note = 2'-Fluoro-uridine
  modified_base 22: mod_base = um
  modified_base 23: mod_base = gm
  modified_base 24: mod_base = um
  modified_base 25: mod_base = gm
  modified_base 26: mod_base = OTHER; note = 2'-O-methyl-adenosine
  modified_base 27: mod_base = cm
  misc_feature 28..30: note = linked via phosphorothioate
  modified_base 28: mod_base = um
  modified_base 29: mod_base = gm
  modified_base 30: mod_base = OTHER; note = 2'-O-methyl-adenosine
  source 1..30: mol_type = other RNA

SEQ ID NO: 345 - RNA, 30 nt, synthetic construct; identical to SEQ ID NO: 316
  modified_base 1: mod_base = OTHER; note = 2'-O,4'-C-Methyleneguanosine
  modified_base 2: mod_base = cm
  modified_base 3: mod_base = um
  modified_base 4: mod_base = OTHER; note = hexadecanamidodiethoxymethanol-adenosine
  modified_base 5: mod_base = cm
  modified_base 6: mod_base = gm
  modified_base 7: mod_base = gm
  modified_base 8: mod_base = OTHER; note = 2'-O,4'-C-Methylenecytidine
  modified_base 9: mod_base = cm
  modified_base 10: mod_base = cm
  modified_base 11: mod_base = OTHER; note = 2'-O-methyl-adenosine
  modified_base 12: mod_base = gm
  modified_base 13: mod_base = um
  modified_base 14: mod_base = gm
  modified_base 15: mod_base = um
  modified_base 16: mod_base = gm
  modified_base 17: mod_base = OTHER; note = 2'-O-methyl-adenosine
  modified_base 18: mod_base = OTHER; note = 2'-Fluoro-guanosine
  modified_base 19: mod_base = OTHER; note = 2'-Fluoro-adenosine
  modified_base 20: mod_base = OTHER; note = 2'-Fluoro-adenosine
  modified_base 21: mod_base = OTHER; note = 2'-Fluoro-uridine
  modified_base 22: mod_base = um
  modified_base 23: mod_base = gm
  modified_base 24: mod_base = um
  modified_base 25: mod_base = gm
  modified_base 26: mod_base = OTHER; note = 2'-O-methyl-adenosine
  modified_base 27: mod_base = cm
  misc_feature 28..30: note = linked via phosphorothioate
  modified_base 28: mod_base = um
  modified_base 29: mod_base = gm
  modified_base 30: mod_base = OTHER; note = 2'-O-methyl-adenosine
  source 1..30: mol_type = other RNA

SEQ ID NO: 346 - RNA, 28 nt, synthetic construct
  modified_base 1: mod_base = OTHER; note = 2'-O,4'-C-Methyleneguanosine
  modified_base 2: mod_base = cm
  modified_base 3: mod_base = um
  modified_base 4: mod_base = OTHER; note = hexadecanamidodiethoxymethanol-adenosine
  modified_base 5: mod_base = cm
  modified_base 6: mod_base = gm
  modified_base 7: mod_base = gm
  modified_base 8: mod_base = OTHER; note = 2'-O,4'-C-Methylenecytidine
  modified_base 9: mod_base = cm
  modified_base 10: mod_base = cm
  modified_base 11: mod_base = OTHER; note = 2'-O-methyl-adenosine
  modified_base 12: mod_base = gm
  modified_base 13: mod_base = um
  modified_base 14: mod_base = gm
  modified_base 15: mod_base = um
  modified_base 16: mod_base = gm
  modified_base 17: mod_base = OTHER; note = 2'-O-methyl-adenosine
  modified_base 18: mod_base = OTHER; note = 2'-Fluoro-guanosine
  modified_base 19: mod_base = OTHER; note = 2'-Fluoro-adenosine
  modified_base 20: mod_base = OTHER; note = 2'-Fluoro-adenosine
  modified_base 21: mod_base = OTHER; note = 2'-Fluoro-uridine
  modified_base 22: mod_base = um
  modified_base 23: mod_base = gm
  modified_base 24: mod_base = um
  modified_base 25: mod_base = gm
  misc_feature 26..28: note = linked via phosphorothioate
  modified_base 26: mod_base = OTHER; note = 2'-O-methyl-adenosine
  modified_base 27: mod_base = cm
  modified_base 28: mod_base = um
  source 1..28: mol_type = other RNA
gctacggcccagtgtgagaattgtgact

SEQ ID NO: 347 - RNA, 38 nt, synthetic construct; identical to SEQ ID NO: 311
  modified_base 1: mod_base = gm
  modified_base 2: mod_base = cm
  modified_base 3: mod_base = OTHER; note = 2'-O-methyl-adenosine
  modified_base 4: mod_base = gm
  modified_base 5: mod_base = cm
  modified_base 6: mod_base = cm
  modified_base 7: mod_base = gm
  modified_base 8: mod_base = OTHER; note = 2'-O-methyl-adenosine
  modified_base 9: mod_base = OTHER; note = 2'-O-methyl-adenosine
  modified_base 10: mod_base = OTHER; note = 2'-O-methyl-adenosine
  modified_base 11: mod_base = gm
  modified_base 12: mod_base = gm
  modified_base 13: mod_base = cm
  modified_base 14: mod_base = um
  modified_base 15: mod_base = gm
  modified_base 16: mod_base = cm
  modified_base 17: mod_base = cm
  modified_base 18: mod_base = cm
  modified_base 19: mod_base = OTHER; note = 2'-O-methyl-adenosine
  modified_base 20: mod_base = gm
  modified_base 21: mod_base = um
  modified_base 22: mod_base = gm
  modified_base 23: mod_base = um
  modified_base 24: mod_base = gm
  modified_base 25: mod_base = OTHER; note = 2'-O-methyl-adenosine
  modified_base 26: mod_base = OTHER; note = 2'-Fluoro-guanosine
  modified_base 27: mod_base = OTHER; note = 2'-Fluoro-adenosine
  modified_base 28: mod_base = OTHER; note = 2'-Fluoro-adenosine
  modified_base 29: mod_base = OTHER; note = 2'-Fluoro-uridine
  modified_base 30: mod_base = um
  modified_base 31: mod_base = gm
  modified_base 32: mod_base = um
  modified_base 33: mod_base = gm
  modified_base 34: mod_base = OTHER; note = 2'-O-methyl-adenosine
  modified_base 35: mod_base = cm
  misc_feature 36..38: note = linked via phosphorothioate
  modified_base 36: mod_base = um
  modified_base 37: mod_base = gm
  modified_base 38: mod_base = OTHER; note = hexadecanamidodiethoxymethanol-adenosine
  source 1..38: mol_type = other RNA

SEQ ID NO: 348 - RNA, 34 nt, synthetic construct; identical to SEQ ID NO: 312
  modified_base 1: mod_base = OTHER; note = 2'-O,4'-C-Methyleneguanosine
  modified_base 2: mod_base = cm
  modified_base 3: mod_base = OTHER; note = 2'-O-methyl-adenosine
  modified_base 4: mod_base = cm
  modified_base 5: mod_base = gm
  modified_base 6: mod_base = OTHER; note = hexadecanamidodiethoxymethanol-adenosine
  modified_base 7: mod_base = OTHER; note = 2'-O-methyl-adenosine
  modified_base 8: mod_base = OTHER; note = 2'-O-methyl-adenosine
  modified_base 9: mod_base = gm
  modified_base 10: mod_base = um
  modified_base 11: mod_base = gm
  modified_base 12: mod_base = OTHER; note = 2'-O,4'-C-Methylenecytidine
  modified_base 13: mod_base = cm
  modified_base 14: mod_base = cm
  modified_base 15: mod_base = OTHER; note = 2'-O-methyl-adenosine
  modified_base 16: mod_base = gm
  modified_base 17: mod_base = um
  modified_base 18: mod_base = gm
  modified_base 19: mod_base = um
  modified_base 20: mod_base = gm
  modified_base 21: mod_base = OTHER; note = 2'-O-methyl-adenosine
  modified_base 22: mod_base = OTHER; note = 2'-Fluoro-guanosine
  modified_base 23: mod_base = OTHER; note = 2'-Fluoro-adenosine
  modified_base 24: mod_base = OTHER; note = 2'-Fluoro-adenosine
  modified_base 25: mod_base = OTHER; note = 2'-Fluoro-uridine
  modified_base 26: mod_base = um
  modified_base 27: mod_base = gm
  modified_base 28: mod_base = um
  modified_base 29: mod_base = gm
  modified_base 30: mod_base = OTHER; note = 2'-O-methyl-adenosine
  modified_base 31: mod_base = cm
  misc_feature 32..34: note = linked via phosphorothioate
  modified_base 32: mod_base = um
  modified_base 33: mod_base = gm
  modified_base 34: mod_base = OTHER; note = 2'-O-methyl-adenosine
  source 1..34: mol_type = other RNA

SEQ ID NO: 349 - RNA, 34 nt, synthetic construct; identical to SEQ ID NO: 312
  modified_base 1: mod_base = OTHER; note = 2'-O,4'-C-Methyleneguanosine
  modified_base 2: mod_base = OTHER; note = 2'-O,4'-C-Methylenecytidine
  modified_base 3: mod_base = OTHER; note = 2'-O-methyl-adenosine
  modified_base 4: mod_base = cm
  modified_base 5: mod_base = gm
  modified_base 6: mod_base = OTHER; note = hexadecanamidodiethoxymethanol-adenosine
  modified_base 7: mod_base = OTHER; note = 2'-O-methyl-adenosine
  modified_base 8: mod_base = OTHER; note = 2'-O-methyl-adenosine
  modified_base 9: mod_base = gm
  modified_base 10: mod_base = um
  modified_base 11: mod_base = OTHER; note = 2'-O,4'-C-Methyleneguanosine
  modified_base 12: mod_base = OTHER; note = 2'-O,4'-C-Methylenecytidine
  modified_base 13: mod_base = cm
  modified_base 14: mod_base = cm
  modified_base 15: mod_base = OTHER; note = 2'-O-methyl-adenosine
  modified_base 16: mod_base = gm
  modified_base 17: mod_base = um
  modified_base 18: mod_base = gm
  modified_base 19: mod_base = um
  modified_base 20: mod_base = gm
  modified_base 21: mod_base = OTHER; note = 2'-O-methyl-adenosine
  modified_base 22: mod_base = OTHER; note = 2'-Fluoro-guanosine
  modified_base 23: mod_base = OTHER; note = 2'-Fluoro-adenosine
  modified_base 24: mod_base = OTHER; note = 2'-Fluoro-adenosine
  modified_base 25: mod_base = OTHER; note = 2'-Fluoro-uridine
  modified_base 26: mod_base = um
  modified_base 27: mod_base = gm
  modified_base 28: mod_base = um
  modified_base 29: mod_base = gm
  modified_base 30: mod_base = OTHER; note = 2'-O-methyl-adenosine
  modified_base 31: mod_base = cm
  misc_feature 32..34: note = linked via phosphorothioate
  modified_base 32: mod_base = um
  modified_base 33: mod_base = gm
  modified_base 34: mod_base = OTHER; note = 2'-O-methyl-adenosine
  source 1..34: mol_type = other RNA

SEQ ID NO: 350 - DNA, 34 bp, synthetic construct; identical to SEQ ID NO: 322
  misc_feature 1..9: note = RNA fragment
  misc_feature 10: note = DNA fragment
  misc_feature 11..34: note = RNA fragment
  modified_base 1: mod_base = OTHER; note = 2'-O,4'-C-Methyleneguanosine
  modified_base 2: mod_base = OTHER; note = 2'-O,4'-C-Methylenecytidine
  modified_base 3: mod_base = OTHER; note = 2'-O,4'-C-Methyleneadenosine
  modified_base 4: mod_base = cm
  modified_base 5: mod_base = gm
  modified_base 6: mod_base = OTHER; note = hexadecanamidodiethoxymethanol-adenosine
  modified_base 7: mod_base = OTHER; note = 2'-O-methyl-adenosine
  modified_base 8: mod_base = OTHER; note = 2'-O-methyl-adenosine
  modified_base 9: mod_base = gm
  modified_base 10: mod_base = OTHER; note = 2'-O,4'-C-Methylenethymine
  modified_base 11: mod_base = OTHER; note = 2'-O,4'-C-Methyleneguanosine
  modified_base 12: mod_base = OTHER; note = 2'-O,4'-C-Methylenecytidine
  modified_base 13: mod_base = cm
  modified_base 14: mod_base = cm
  modified_base 15: mod_base = OTHER; note = 2'-O-methyl-adenosine
  modified_base 16: mod_base = gm
  modified_base 17: mod_base = um
  modified_base 18: mod_base = gm
  modified_base 19: mod_base = um
  modified_base 20: mod_base = gm
  modified_base 21: mod_base = OTHER; note = 2'-O-methyl-adenosine
  modified_base 22: mod_base = OTHER; note = 2'-Fluoro-guanosine
  modified_base 23: mod_base = OTHER; note = 2'-Fluoro-adenosine
  modified_base 24: mod_base = OTHER; note = 2'-Fluoro-adenosine
  modified_base 25: mod_base = OTHER; note = 2'-Fluoro-uridine
  modified_base 26: mod_base = um
  modified_base 27: mod_base = gm
  modified_base 28: mod_base = um
  modified_base 29: mod_base = gm
  modified_base 30: mod_base = OTHER; note = 2'-O-methyl-adenosine
  modified_base 31: mod_base = cm
  misc_feature 32..34: note = linked via phosphorothioate
  modified_base 32: mod_base = um
  modified_base 33: mod_base = gm
  modified_base 34: mod_base = OTHER; note = 2'-O-methyl-adenosine
  source 1..34: mol_type = other DNA

SEQ ID NO: 351 - RNA, 30 nt, synthetic construct; identical to SEQ ID NO: 316
  modified_base 1: mod_base = OTHER; note = 2'-O,4'-C-Methyleneguanosine
  modified_base 2: mod_base = OTHER; note = 2'-O,4'-C-Methylenecytidine
  modified_base 3: mod_base = um
  modified_base 4: mod_base = OTHER; note = hexadecanamidodiethoxymethanol-adenosine
  modified_base 5: mod_base = cm
  modified_base 6: mod_base = gm
  modified_base 7: mod_base = OTHER; note = 2'-O,4'-C-Methyleneguanosine
  modified_base 8: mod_base = OTHER; note = 2'-O,4'-C-Methylenecytidine
  modified_base 9: mod_base = cm
  modified_base 10: mod_base = cm
  modified_base 11: mod_base = OTHER; note = 2'-O-methyl-adenosine
  modified_base 12: mod_base = gm
  modified_base 13: mod_base = um
  modified_base 14: mod_base = gm
  modified_base 15: mod_base = um
  modified_base 16: mod_base = gm
  modified_base 17: mod_base = OTHER; note = 2'-O-methyl-adenosine
  modified_base 18: mod_base = OTHER; note = 2'-Fluoro-guanosine
  modified_base 19: mod_base = OTHER; note = 2'-Fluoro-adenosine
  modified_base 20: mod_base = OTHER; note = 2'-Fluoro-adenosine
  modified_base 21: mod_base = OTHER; note = 2'-Fluoro-uridine
  modified_base 22: mod_base = um
  modified_base 23: mod_base = gm
  modified_base 24: mod_base = um
  modified_base 25: mod_base = gm
  modified_base 26: mod_base = OTHER; note = 2'-O-methyl-adenosine
  modified_base 27: mod_base = cm
  misc_feature 28..30: note = linked via phosphorothioate
  modified_base 28: mod_base = um
  modified_base 29: mod_base = gm
  modified_base 30: mod_base = OTHER; note = 2'-O-methyl-adenosine
  source 1..30: mol_type = other RNA

SEQ ID NO: 352 - RNA, 22 nt, synthetic construct
  misc_feature 1..4: note = linked via phosphorothioate
  modified_base 1: mod_base = OTHER; note = 4'-O-monomethylphosphonate-2'-O-methylmethyluridine
  modified_base 2: mod_base = OTHER; note = 2'-Fluoro-cytidine
  modified_base 3: mod_base = OTHER; note = 2'-Fluoro-adenosine
  modified_base 4: mod_base = OTHER; note = 2'-Fluoro-guanosine
  modified_base 5: mod_base = OTHER; note = 2'-Fluoro-uridine
  modified_base 6: mod_base = cm
  modified_base 7: mod_base = OTHER; note = 2'-Fluoro-adenosine
  modified_base 8: mod_base = cm
  modified_base 9: mod_base = OTHER; note = 2'-O-methyl-adenosine
  modified_base 10: mod_base = OTHER; note = 2'-Fluoro-adenosine
  modified_base 11: mod_base = um
  modified_base 12: mod_base = um
  modified_base 13: mod_base = cm
  modified_base 14: mod_base = OTHER; note = 2'-Fluoro-uridine
  modified_base 15: mod_base = cm
  modified_base 16: mod_base = OTHER; note = 2'-O-methyl-adenosine
  modified_base 17: mod_base = cm
  modified_base 18: mod_base = OTHER; note = 2'-O-methyl-adenosine
  modified_base 19: mod_base = cm
  misc_feature 20..22: note = linked via phosphorothioate
  modified_base 20: mod_base = um
  modified_base 21: mod_base = gm
  modified_base 22: mod_base = gm
  source 1..22: mol_type = other RNA
tcagtcacaattctcacactgg

SEQ ID NO: 353 - RNA, 22 nt, synthetic construct
  misc_feature 1..4: note = linked via phosphorothioate
  modified_base 1: mod_base = OTHER; note = 4'-O-monomethylphosphonate-2'-O-methylmethyluridine
  modified_base 2: mod_base = OTHER; note = 2'-Fluoro-cytidine
  modified_base 3: mod_base = OTHER; note = 2'-Fluoro-adenosine
  modified_base 4: mod_base = OTHER; note = 2'-Fluoro-guanosine
  modified_base 5: mod_base = OTHER; note = 2'-Fluoro-uridine
  modified_base 6: mod_base = cm
  modified_base 7: mod_base = OTHER; note = 2'-Fluoro-adenosine
  modified_base 8: mod_base = cm
  modified_base 9: mod_base = OTHER; note = 2'-O-methyl-adenosine
  modified_base 10: mod_base = OTHER; note = 2'-Fluoro-adenosine
  modified_base 11: mod_base = um
  modified_base 12: mod_base = um
  modified_base 13: mod_base = cm
  modified_base 14: mod_base = OTHER; note = 2'-Fluoro-uridine
  modified_base 15: mod_base = cm
  modified_base 16: mod_base = OTHER; note = 2'-O-methyl-adenosine
  modified_base 17: mod_base = cm
  modified_base 18: mod_base = OTHER; note = 2'-O-methyl-adenosine
  modified_base 19: mod_base = cm
  misc_feature 20..22: note = linked via phosphorothioate
  modified_base 20: mod_base = um
  modified_base 21: mod_base = gm
  modified_base 22: mod_base = gm
  source 1..22: mol_type = other RNA
tcagtcacaattctcacactgg

SEQ ID NO: 354 - RNA, 22 nt, synthetic construct
  misc_feature 1..4: note = linked via phosphorothioate
  modified_base 1: mod_base = OTHER; note = 4'-O-monomethylphosphonate-2'-O-methylmethyluridine
  modified_base 2: mod_base = OTHER; note = 2'-Fluoro-cytidine
  modified_base 3: mod_base = OTHER; note = 2'-Fluoro-adenosine
  modified_base 4: mod_base = OTHER; note = 2'-Fluoro-guanosine
  modified_base 5: mod_base = OTHER; note = 2'-Fluoro-uridine
  modified_base 6: mod_base = cm
  modified_base 7: mod_base = OTHER; note = 2'-Fluoro-adenosine
  modified_base 8: mod_base = cm
  modified_base 9: mod_base = OTHER; note = 2'-O-methyl-adenosine
  modified_base 10: mod_base = OTHER; note = 2'-Fluoro-adenosine
  modified_base 11: mod_base = um
  modified_base 12: mod_base = um
  modified_base 13: mod_base = cm
  modified_base 14: mod_base = OTHER; note = 2'-Fluoro-uridine
  modified_base 15: mod_base = cm
  modified_base 16: mod_base = OTHER; note = 2'-O-methyl-adenosine
  modified_base 17: mod_base = cm
  modified_base 18: mod_base = OTHER; note = 2'-O-methyl-adenosine
  modified_base 19: mod_base = cm
  misc_feature 20..22: note = linked via phosphorothioate
  modified_base 20: mod_base = um
  modified_base 21: mod_base = gm
  modified_base 22: mod_base = gm
  source 1..22: mol_type = other RNA
tcagtcacaattctcacactgg

SEQ ID NO: 355 - RNA, 22 nt, synthetic construct
  misc_feature 1..4: note = linked via phosphorothioate
  modified_base 1: mod_base = OTHER; note = 4'-O-monomethylphosphonate-2'-O-methylmethyluridine
  modified_base 2: mod_base = OTHER; note = 2'-Fluoro-cytidine
  modified_base 3: mod_base = OTHER; note = 2'-Fluoro-adenosine
  modified_base 4: mod_base = OTHER; note = 2'-Fluoro-guanosine
  modified_base 5: mod_base = OTHER; note = 2'-Fluoro-uridine
  modified_base 6: mod_base = cm
  modified_base 7: mod_base = OTHER; note = 2'-Fluoro-adenosine
  modified_base 8: mod_base = cm
  modified_base 9: mod_base = OTHER; note = 2'-O-methyl-adenosine
  modified_base 10: mod_base = OTHER; note = 2'-Fluoro-adenosine
  modified_base 11: mod_base = um
  modified_base 12: mod_base = um
  modified_base 13: mod_base = cm
  modified_base 14: mod_base = OTHER; note = 2'-Fluoro-uridine
  modified_base 15: mod_base = cm
  modified_base 16: mod_base = OTHER; note = 2'-O-methyl-adenosine
  modified_base 17: mod_base = cm
  modified_base 18: mod_base = OTHER; note = 2'-O-methyl-adenosine
  modified_base 19: mod_base = cm
  misc_feature 20..22: note = linked via phosphorothioate
  modified_base 20: mod_base = um
  modified_base 21: mod_base = gm
  modified_base 22: mod_base = gm
  source 1..22: mol_type = other RNA
tcagtcacaattctcacactgg

SEQ ID NO: 356 - RNA, 22 nt, synthetic construct
  misc_feature 1..4: note = linked via phosphorothioate
  modified_base 1: mod_base = OTHER; note = 4'-O-monomethylphosphonate-2'-O-methylmethyluridine
  modified_base 2: mod_base = OTHER; note = 2'-Fluoro-cytidine
  modified_base 3: mod_base = OTHER; note = 2'-Fluoro-adenosine
  modified_base 4: mod_base = OTHER; note = 2'-Fluoro-guanosine
  modified_base 5: mod_base = OTHER; note = 2'-Fluoro-uridine
  modified_base 6: mod_base = cm
  modified_base 7: mod_base = OTHER; note = 2'-Fluoro-adenosine
  modified_base 8: mod_base = cm
  modified_base 9: mod_base = OTHER; note = 2'-O-methyl-adenosine
  modified_base 10: mod_base = OTHER; note = 2'-Fluoro-adenosine
  modified_base 11: mod_base = um
  modified_base 12: mod_base = um
  modified_base 13: mod_base = cm
  modified_base 14: mod_base = OTHER; note = 2'-Fluoro-uridine
  modified_base 15: mod_base = cm
  modified_base 16: mod_base = OTHER; note = 2'-O-methyl-adenosine
  modified_base 17: mod_base = cm
  modified_base 18: mod_base = OTHER; note = 2'-O-methyl-adenosine
  modified_base 19: mod_base = cm
  misc_feature 20..22: note = linked via phosphorothioate
  modified_base 20: mod_base = um
  modified_base 21: mod_base = gm
  modified_base 22: mod_base = gm
  source 1..22: mol_type = other RNA
tcagtcacaattctcacactgg

SEQ ID NO: 357 - RNA, 22 nt, synthetic construct
  misc_feature 1..4: note = linked via phosphorothioate
  modified_base 1: mod_base = OTHER; note = 4'-O-monomethylphosphonate-2'-O-methylmethyluridine
  modified_base 2: mod_base = OTHER; note = 2'-Fluoro-cytidine
  modified_base 3: mod_base = OTHER; note = 2'-Fluoro-adenosine
  modified_base 4: mod_base = OTHER; note = 2'-Fluoro-guanosine
  modified_base 5: mod_base = OTHER; note = 2'-Fluoro-uridine
  modified_base 6: mod_base = cm
  modified_base 7: mod_base = OTHER; note = 2'-Fluoro-adenosine
  modified_base 8: mod_base = cm
  modified_base 9: mod_base = OTHER; note = 2'-O-methyl-adenosine
  modified_base 10: mod_base = OTHER; note = 2'-Fluoro-adenosine
  modified_base 11: mod_base = um
  modified_base 12: mod_base = um
  modified_base 13: mod_base = cm
  modified_base 14: mod_base = OTHER; note = 2'-Fluoro-uridine
  modified_base 15: mod_base = cm
  modified_base 16: mod_base = OTHER; note = 2'-O-methyl-adenosine
  modified_base 17: mod_base = cm
  modified_base 18: mod_base = OTHER; note = 2'-O-methyl-adenosine
  modified_base 19: mod_base = cm
  misc_feature 20..22: note = linked via phosphorothioate
  modified_base 20: mod_base = um
  modified_base 21: mod_base = gm
  modified_base 22: mod_base = gm
  source 1..22: mol_type = other RNA
tcagtcacaattctcacactgg

SEQ ID NO: 358 - RNA, 22 nt, synthetic construct
  misc_feature 1..4: note = linked via phosphorothioate
  modified_base 1: mod_base = OTHER; note = 4'-O-monomethylphosphonate-2'-O-methylmethyluridine
  modified_base 2: mod_base = OTHER; note = 2'-Fluoro-cytidine
  modified_base 3: mod_base = OTHER; note = 2'-Fluoro-adenosine
  modified_base 4: mod_base = OTHER; note = 2'-Fluoro-guanosine
  modified_base 5: mod_base = OTHER; note = 2'-Fluoro-uridine
  modified_base 6: mod_base = cm
  modified_base 7: mod_base = OTHER; note = 2'-Fluoro-adenosine
  modified_base 8: mod_base = cm
  modified_base 9: mod_base = OTHER; note = 2'-O-methyl-adenosine
  modified_base 10: mod_base = OTHER; note = 2'-Fluoro-adenosine
  modified_base 11: mod_base = um
  modified_base 12: mod_base = um
  modified_base 13: mod_base = cm
  modified_base 14: mod_base = OTHER; note = 2'-Fluoro-uridine
  modified_base 15: mod_base = cm
  modified_base 16: mod_base = OTHER; note = 2'-O-methyl-adenosine
  modified_base 17: mod_base = cm
  modified_base 18: mod_base = OTHER; note = 2'-O-methyl-adenosine
  modified_base 19: mod_base = cm
  misc_feature 20..22: note = linked via phosphorothioate
  modified_base 20: mod_base = um
  modified_base 21: mod_base = gm
  modified_base 22: mod_base = gm
  source 1..22: mol_type = other RNA
tcagtcacaattctcacactgg

SEQ ID NO: 359 - RNA, 22 nt, synthetic construct
  misc_feature 1..4: note = linked via phosphorothioate
  modified_base 1: mod_base = OTHER; note = 4'-O-monomethylphosphonate-2'-O-methylmethyluridine
  modified_base 2: mod_base = OTHER; note = 2'-Fluoro-cytidine
  modified_base 3: mod_base = OTHER; note = 2'-Fluoro-adenosine
  modified_base 4: mod_base = OTHER; note = 2'-Fluoro-guanosine
  modified_base 5: mod_base = OTHER; note = 2'-Fluoro-uridine
  modified_base 6: mod_base = cm
  modified_base 7: mod_base = OTHER; note = 2'-Fluoro-adenosine
  modified_base 8: mod_base = cm
  modified_base 9: mod_base = OTHER; note = 2'-O-methyl-adenosine
  modified_base 10: mod_base = OTHER; note = 2'-Fluoro-adenosine
  modified_base 11: mod_base = um
  modified_base 12: mod_base = um
  modified_base 13: mod_base = cm
  modified_base 14: mod_base = OTHER; note = 2'-Fluoro-uridine
  modified_base 15: mod_base = cm
  modified_base 16: mod_base = OTHER; note = 2'-O-methyl-adenosine
  modified_base 17: mod_base = cm
  modified_base 18: mod_base = OTHER; note = 2'-O-methyl-adenosine
  modified_base 19: mod_base = cm
  misc_feature 20..22: note = linked via phosphorothioate
  modified_base 20: mod_base = um
  modified_base 21: mod_base = gm
  modified_base 22: mod_base = gm
  source 1..22: mol_type = other RNA
tcagtcacaattctcacactgg

SEQ ID NO: 360 - RNA, 22 nt, synthetic construct
  misc_feature 1..4: note = linked via phosphorothioate
  modified_base 1: mod_base = OTHER; note = 4'-O-monomethylphosphonate-2'-O-methylmethyluridine
  modified_base 2: mod_base = OTHER; note = 2'-Fluoro-cytidine
  modified_base 3: mod_base = OTHER; note = 2'-Fluoro-adenosine
  modified_base 4: mod_base = OTHER; note = 2'-Fluoro-guanosine
  modified_base 5: mod_base = OTHER; note = 2'-Fluoro-uridine
  modified_base 6: mod_base = cm
  modified_base 7: mod_base = OTHER; note = 2'-Fluoro-adenosine
  modified_base 8: mod_base = cm
  modified_base 9: mod_base = OTHER; note = 2'-O-methyl-adenosine
  modified_base 10: mod_base = OTHER; note = 2'-Fluoro-adenosine
  modified_base 11: mod_base = um
  modified_base 12: mod_base = um
  modified_base 13: mod_base = cm
  modified_base 14: mod_base = OTHER; note = 2'-Fluoro-uridine
  modified_base 15: mod_base = cm
  modified_base 16: mod_base = OTHER; note = 2'-O-methyl-adenosine
  modified_base 17: mod_base = cm
  modified_base 18: mod_base = OTHER; note = 2'-O-methyl-adenosine
  modified_base 19: mod_base = cm
  misc_feature 20..22: note = linked via phosphorothioate
  modified_base 20: mod_base = um
  modified_base 21: mod_base = gm
  modified_base 22: mod_base = gm
  source 1..22: mol_type = other RNA
tcagtcacaattctcacactgg

SEQ ID NO: 361 - RNA, 22 nt, synthetic construct
  misc_feature 1..4: note = linked via phosphorothioate
  modified_base 1: mod_base = OTHER; note = 4'-O-monomethylphosphonate-2'-O-methylmethyluridine
  modified_base 2: mod_base = OTHER; note = 2'-Fluoro-cytidine
  modified_base 3: mod_base = OTHER; note = 2'-Fluoro-adenosine
  modified_base 4: mod_base = OTHER; note = 2'-Fluoro-guanosine
  modified_base 5: mod_base = OTHER; note = 2'-Fluoro-uridine
  modified_base 6: mod_base = cm
  modified_base 7: mod_base = OTHER; note = 2'-Fluoro-adenosine
  modified_base 8: mod_base = cm
  modified_base 9: mod_base = OTHER; note = 2'-O-methyl-adenosine
  modified_base 10: mod_base = OTHER; note = 2'-Fluoro-adenosine
  modified_base 11: mod_base = um
  modified_base 12: mod_base = um
  modified_base 13: mod_base = cm
  modified_base 14: mod_base = OTHER; note = 2'-Fluoro-uridine
  modified_base 15: mod_base = cm
  modified_base 16: mod_base = OTHER; note = 2'-O-methyl-adenosine
  modified_base 17: mod_base = cm
  modified_base 18: mod_base = OTHER; note = 2'-O-methyl-adenosine
  modified_base 19: mod_base = cm
  misc_feature 20..22: note = linked via phosphorothioate
  modified_base 20: mod_base = um
  modified_base 21: mod_base = gm
  modified_base 22: mod_base = gm
  source 1..22: mol_type = other RNA
tcagtcacaattctcacactgg

SEQ ID NO: 362 - RNA, 22 nt, synthetic construct
  misc_feature 1..4: note = linked via phosphorothioate
  modified_base 1: mod_base = OTHER; note = 4'-O-monomethylphosphonate-2'-O-methylmethyluridine
  modified_base 2: mod_base = OTHER; note = 2'-Fluoro-cytidine
  modified_base 3: mod_base = OTHER; note = 2'-Fluoro-adenosine
  modified_base 4: mod_base = OTHER; note = 2'-Fluoro-guanosine
  modified_base 5: mod_base = OTHER; note = 2'-Fluoro-uridine
  modified_base 6: mod_base = cm
  modified_base 7: mod_base = OTHER; note = 2'-Fluoro-adenosine
  modified_base 8: mod_base = cm
  modified_base 9: mod_base = OTHER; note = 2'-O-methyl-adenosine
  modified_base 10: mod_base = OTHER; note = 2'-Fluoro-adenosine
  modified_base 11: mod_base = um
  modified_base 12: mod_base = um
  modified_base 13: mod_base = cm
  modified_base 14: mod_base = OTHER; note = 2'-Fluoro-uridine
  modified_base 15: mod_base = cm
  modified_base 16: mod_base = OTHER; note = 2'-O-methyl-adenosine
  modified_base 17: mod_base = cm
  modified_base 18: mod_base = OTHER; note = 2'-O-methyl-adenosine
  modified_base 19: mod_base = cm
  misc_feature 20..22: note = linked via phosphorothioate
  modified_base 20: mod_base = um
  modified_base 21: mod_base = gm
  modified_base 22: mod_base = gm
  source 1..22: mol_type = other RNA
tcagtcacaattctcacactgg

SEQ ID NO: 363 - RNA, 22 nt, synthetic construct
  misc_feature 1..4: note = linked via phosphorothioate
  modified_base 1: mod_base = OTHER; note = 4'-O-monomethylphosphonate-2'-O-methylmethyluridine
  modified_base 2: mod_base = OTHER; note = 2'-Fluoro-cytidine
  modified_base 3: mod_base = OTHER; note = 2'-Fluoro-adenosine
  modified_base 4: mod_base = OTHER; note = 2'-Fluoro-guanosine
  modified_base 5: mod_base = OTHER; note = 2'-Fluoro-uridine
  modified_base 6: mod_base = cm
  modified_base 7: mod_base = OTHER; note = 2'-Fluoro-adenosine
  modified_base 8: mod_base = cm
  modified_base 9: mod_base = OTHER; note = 2'-O-methyl-adenosine
  modified_base 10: mod_base = OTHER; note = 2'-Fluoro-adenosine
  modified_base 11: mod_base = um
  modified_base 12: mod_base = um
  modified_base 13: mod_base = cm
  modified_base 14: mod_base = OTHER; note = 2'-Fluoro-uridine
  modified_base 15: mod_base = cm
  modified_base 16: mod_base = OTHER; note = 2'-O-methyl-adenosine
  modified_base 17: mod_base = cm
  modified_base 18: mod_base = OTHER; note = 2'-O-methyl-adenosine
  modified_base 19: mod_base = cm
  misc_feature 20..22: note = linked via phosphorothioate
  modified_base 20: mod_base = um
  modified_base 21: mod_base = gm
  modified_base 22: mod_base = gm
  source 1..22: mol_type = other RNA
tcagtcacaattctcacactgg

SEQ ID NO: 364 - RNA, 22 nt, synthetic construct
  misc_feature 1..4: note = linked via phosphorothioate
  modified_base 1: mod_base = OTHER; note = 4'-O-monomethylphosphonate-2'-O-methylmethyluridine
  modified_base 2: mod_base = OTHER; note = 2'-Fluoro-cytidine
  modified_base 3: mod_base = OTHER; note = 2'-Fluoro-adenosine
  modified_base 4: mod_base = OTHER; note = 2'-Fluoro-guanosine
  modified_base 5: mod_base = OTHER; note = 2'-Fluoro-uridine
  modified_base 6: mod_base = cm
  modified_base 7: mod_base = OTHER; note = 2'-Fluoro-adenosine
  modified_base 8: mod_base = cm
  modified_base 9: mod_base = OTHER; note = 2'-O-methyl-adenosine
  modified_base 10: mod_base = OTHER; note = 2'-Fluoro-adenosine
  modified_base 11: mod_base = um
  modified_base 12: mod_base = um
  modified_base 13: mod_base = cm
  modified_base 14: mod_base = OTHER; note = 2'-Fluoro-uridine
  modified_base 15: mod_base = cm
  modified_base 16: mod_base = OTHER; note = 2'-O-methyl-adenosine
  modified_base 17: mod_base = cm
  modified_base 18: mod_base = OTHER; note = 2'-O-methyl-adenosine
  modified_base 19: mod_base = cm
  misc_feature 20..22: note = linked via phosphorothioate
  modified_base 20: mod_base = um
  modified_base 21: mod_base = gm
  modified_base 22: mod_base = gm
  source 1..22: mol_type = other RNA
tcagtcacaattctcacactgg

SEQ ID NO: 365 - RNA, 22 nt, synthetic construct
  misc_feature 1..4: note = linked via phosphorothioate
  modified_base 1: mod_base = OTHER; note = 4'-O-monomethylphosphonate-2'-O-methylmethyluridine
  modified_base 2: mod_base = OTHER; note = 2'-Fluoro-cytidine
  modified_base 3: mod_base = OTHER; note = 2'-Fluoro-adenosine
  modified_base 4: mod_base = OTHER; note = 2'-Fluoro-guanosine
  modified_base 5: mod_base = OTHER; note = 2'-Fluoro-uridine
  modified_base 6: mod_base = cm
  modified_base 7: mod_base = OTHER; note = 2'-Fluoro-adenosine
  modified_base 8: mod_base = cm
  modified_base 9: mod_base = OTHER; note = 2'-O-methyl-adenosine
  modified_base 10: mod_base = OTHER; note = 2'-Fluoro-adenosine
  modified_base 11: mod_base = um
  modified_base 12: mod_base = um
  modified_base 13: mod_base = cm
  modified_base 14: mod_base = OTHER; note = 2'-Fluoro-uridine
  modified_base 15: mod_base = cm
  modified_base 16: mod_base = OTHER; note = 2'-O-methyl-adenosine
  modified_base 17: mod_base = cm
  modified_base 18: mod_base = OTHER; note = 2'-O-methyl-adenosine
  modified_base 19: mod_base = cm
  misc_feature 20..22: note = linked via phosphorothioate
  modified_base 20: mod_base = um
  modified_base 21: mod_base = gm
  modified_base 22: mod_base = gm
  source 1..22: mol_type = other RNA
tcagtcacaattctcacactgg

SEQ ID NO: 366 - RNA, 30 nt, synthetic construct; identical to SEQ ID NO: 316
  source 1..30: mol_type = other RNA

SEQ ID NO: 367 - RNA, 30 nt, synthetic construct; identical to SEQ ID NO: 316
  source 1..30: mol_type = other RNA

SEQ ID NO: 368 - RNA, 28 nt, synthetic construct
  source 1..28: mol_type = other RNA
gctacggcccagtgtgagaattgtgact

SEQ ID NO: 369 - RNA, 28 nt, synthetic construct
  source 1..28: mol_type = other RNA
gctacggcccagtgtgagaattgtgact

SEQ ID NO: 370 - RNA, 18 nt, synthetic construct
  source 1..18: mol_type = other RNA
agtgtgagaattgtgact

SEQ ID NO: 371 - RNA, 18 nt, synthetic construct
  source 1..18: mol_type = other RNA
agtgtgagaattgtgact

SEQ ID NO: 372 - RNA, 20 nt, synthetic construct
  source 1..20: mol_type = other RNA
agtgtgagaattgtgactga

SEQ ID NO: 373 - RNA, 22 nt, synthetic construct
  source 1..22: mol_type = other RNA
tcagtcacaattctcacactgg

SEQ ID NO: 374 - RNA, 22 nt, synthetic construct
  source 1..22: mol_type = other RNA
tcagtcacaattctcacactgg

SEQ ID NO: 375 - RNA, 22 nt, synthetic construct
  source 1..22: mol_type = other RNA
tcagtcacaattctcacactgg

SEQ ID NO: 376 - RNA, 20 nt, synthetic construct
  source 1..20: mol_type = other RNA
agtcacaattctcacactgg

SEQ ID NO: 377 - RNA, 22 nt, synthetic construct
  source 1..22: mol_type = other RNA
tcagtcacaattctcacactgg

SEQ ID NO: 378 - RNA, 20 nt, synthetic construct
  source 1..20: mol_type = other RNA
agtcacaattctcacactgg

SEQ ID NO: 379 - RNA, 22 nt, synthetic construct
  source 1..22: mol_type = other RNA
tcagtcacaattctcacactgg

SEQ ID NO: 380 - RNA, 30 nt, synthetic construct; identical to SEQ ID NO: 316
  modified_base 1: mod_base = gm
  modified_base 2: mod_base = cm
  modified_base 3: mod_base = um
  modified_base 4: mod_base = OTHER; note = hexadecanamidodiethoxymethanol-adenosine
  modified_base 5: mod_base = cm
  modified_base 6: mod_base = gm
  modified_base 7: mod_base = gm
  modified_base 8: mod_base = cm
  modified_base 9: mod_base = cm
  modified_base 10: mod_base = cm
  modified_base 11: mod_base = OTHER; note = 2'-O-methyl-adenosine
  modified_base 12: mod_base = gm
  modified_base 13: mod_base = um
  modified_base 14: mod_base = gm
  modified_base 15: mod_base = um
  modified_base 16: mod_base = gm
  modified_base 17: mod_base = OTHER; note = 2'-O-methyl-adenosine
  modified_base 18: mod_base = OTHER; note = 2'-Fluoro-guanosine
  modified_base 19: mod_base = OTHER; note = 2'-Fluoro-adenosine
  modified_base 20: mod_base = OTHER; note = 2'-Fluoro-adenosine
  modified_base 21: mod_base = OTHER; note = 2'-Fluoro-uridine
  modified_base 22: mod_base = um
  modified_base 23: mod_base = gm
  modified_base 24: mod_base = um
  modified_base 25: mod_base = gm
  modified_base 26: mod_base = OTHER; note = 2'-O-methyl-adenosine
  modified_base 27: mod_base = cm
  misc_feature 28..30: note = linked via phosphorothioate
  modified_base 28: mod_base = um
  modified_base 29: mod_base = gm
  modified_base 30: mod_base = OTHER; note = 2'-O-methyl-adenosine
  source 1..30: mol_type = other RNA

SEQ ID NO: 381 - RNA, 30 nt, synthetic construct; identical to SEQ ID NO: 316
  modified_base 1: mod_base = OTHER; note = 2'-O,4'-C-Methyleneguanosine
  modified_base 2: mod_base = cm
  modified_base 3: mod_base = um
  modified_base 4: mod_base = OTHER; note = hexadecanamidodiethoxymethanol-adenosine
  modified_base 5: mod_base = cm
  modified_base 6: mod_base = gm
  modified_base 7: mod_base = gm
  modified_base 8: mod_base = OTHER; note = 2'-O,4'-C-Methylenecytidine
  modified_base 9: mod_base = cm
  modified_base 10: mod_base = cm
  modified_base 11: mod_base = OTHER; note = 2'-O-methyl-adenosine
  modified_base 12: mod_base = gm
  modified_base 13: mod_base = um
  modified_base 14: mod_base = gm
  modified_base 15: mod_base = um
  modified_base 16: mod_base = gm
  modified_base 17: mod_base = OTHER; note = 2'-O-methyl-adenosine
  modified_base 18: mod_base = OTHER; note = 2'-Fluoro-guanosine
  modified_base 19: mod_base = OTHER; note = 2'-Fluoro-adenosine
  modified_base 20: mod_base = OTHER; note = 2'-Fluoro-adenosine
  modified_base 21: mod_base = OTHER; note = 2'-Fluoro-uridine
  modified_base 22: mod_base = um
  modified_base 23: mod_base = gm
  modified_base 24: mod_base = um
  modified_base 25: mod_base = gm
  modified_base 26: mod_base = OTHER; note = 2'-O-methyl-adenosine
  modified_base 27: mod_base = cm
  misc_feature 28..30: note = linked via phosphorothioate
  modified_base 28: mod_base = um
  modified_base 29: mod_base = gm
  modified_base 30: mod_base = OTHER; note = 2'-O-methyl-adenosine
  source 1..30: mol_type = other RNA

SEQ ID NO: 382 - RNA, 28 nt, synthetic construct
  modified_base 1: mod_base = OTHER; note = 2'-O,4'-C-Methyleneguanosine
  modified_base 2: mod_base = cm
  modified_base 3: mod_base = um
  modified_base 4: mod_base = OTHER; note = hexadecanamidodiethoxymethanol-adenosine
  modified_base 5: mod_base = cm
  modified_base 6: mod_base = gm
  modified_base 7: mod_base = gm
  modified_base 8: mod_base = OTHER; note = 2'-O,4'-C-Methylenecytidine
  modified_base 9: mod_base = cm
  modified_base 10: mod_base = cm
  modified_base 11: mod_base = OTHER; note = 2'-O-methyl-adenosine
  modified_base 12: mod_base = gm
  modified_base 13: mod_base = um
  modified_base 14: mod_base = gm
  modified_base 15: mod_base = um
  modified_base 16: mod_base = gm
  modified_base 17: mod_base = OTHER; note = 2'-O-methyl-adenosine
  modified_base 18: mod_base = OTHER; note = 2'-Fluoro-guanosine
  modified_base 19: mod_base = OTHER; note = 2'-Fluoro-adenosine
  modified_base 20: mod_base = OTHER; note = 2'-Fluoro-adenosine
  modified_base 21: mod_base = OTHER; note = 2'-Fluoro-uridine
  modified_base 22: mod_base = um
  modified_base 23: mod_base = gm
  modified_base 24: mod_base = um
  modified_base 25: mod_base = gm
  misc_feature 26..28: note = linked via phosphorothioate
  modified_base 26: mod_base = OTHER; note = 2'-O-methyl-adenosine
  modified_base 27: mod_base = cm
  modified_base 28: mod_base = um
  source 1..28: mol_type = other RNA
gctacggcccagtgtgagaattgtgact

SEQ ID NO: 383 - RNA, 28 nt, synthetic construct
  modified_base 1: mod_base = OTHER; note = 2'-O,4'-C-Methyleneguanosine
  modified_base 2: mod_base = cm
  modified_base 3: mod_base = um
  modified_base 4: mod_base = OTHER; note = hexadecanamidodiethoxymethanol-adenosine
  modified_base 5: mod_base = cm
  modified_base 6: mod_base = gm
  modified_base 7: mod_base = gm
  modified_base 8: mod_base = OTHER; note = 2'-O,4'-C-Methylenecytidine
  modified_base 9: mod_base = cm
  modified_base 10: mod_base = cm
  modified_base 11: mod_base = OTHER; note = 2'-O-methyl-adenosine
  modified_base 12: mod_base = gm
  modified_base 13: mod_base = um
  modified_base 14: mod_base = gm
  modified_base 15: mod_base = um
  modified_base 16: mod_base = gm
  modified_base 17: mod_base = OTHER; note = 2'-O-methyl-adenosine
  modified_base 18: mod_base = OTHER; note = 2'-Fluoro-guanosine
  modified_base 19: mod_base = OTHER; note = 2'-Fluoro-adenosine
  modified_base 20: mod_base = OTHER; note = 2'-Fluoro-adenosine
  modified_base 21: mod_base = OTHER; note = 2'-Fluoro-uridine
  modified_base 22: mod_base = um
  modified_base 23: mod_base = gm
  modified_base 24: mod_base = um
  modified_base 25: mod_base = gm
  misc_feature 26..28: note = linked via phosphorothioate
  modified_base 26: mod_base = OTHER; note = 2'-O-methyl-adenosine
  modified_base 27: mod_base = cm
  modified_base 28: mod_base = um
  source 1..28: mol_type = other RNA
gctacggcccagtgtgagaattgtgact

SEQ ID NO: 384 - RNA, 18 nt, synthetic construct
  misc_feature 1^2: note = linked via phosphorothioate
  modified_base 1: mod_base = OTHER; note = hexadecanamidodiethoxymethanol-adenosine
  modified_base 2: mod_base = gm
  modified_base 3: mod_base = um
  modified_base 4: mod_base = gm
  modified_base 5: mod_base = um
  modified_base 6: mod_base = gm
  modified_base 7: mod_base = OTHER; note = 2'-O-methyl-adenosine
  modified_base 8: mod_base = OTHER; note = 2'-Fluoro-guanosine
  modified_base 9: mod_base = OTHER; note = 2'-Fluoro-adenosine
  modified_base 10: mod_base = OTHER; note = 2'-Fluoro-adenosine
  modified_base 11: mod_base = OTHER; note = 2'-Fluoro-uridine
  modified_base 12: mod_base = um
  modified_base 13: mod_base = gm
  modified_base 14: mod_base = um
  modified_base 15: mod_base = gm
  misc_feature 16..18: note = linked via phosphorothioate
  modified_base 16: mod_base = OTHER; note = 2'-O-methyl-adenosine
  modified_base 17: mod_base = cm
  modified_base 18: mod_base = um
  source 1..18: mol_type = other RNA
agtgtgagaattgtgact

SEQ ID NO: 385 - RNA, 18 nt, synthetic construct
  misc_feature 1^2: note = linked via phosphorothioate
  modified_base 1: mod_base = OTHER; note = hexadecanamidodiethoxymethanol-adenosine
  modified_base 2: mod_base = gm
  modified_base 3: mod_base = um
  modified_base 4: mod_base = gm
  modified_base 5: mod_base = um
  modified_base 6: mod_base = gm
  modified_base 7: mod_base = OTHER; note = 2'-O-methyl-adenosine
  modified_base 8: mod_base = OTHER; note = 2'-Fluoro-guanosine
  modified_base 9: mod_base = OTHER; note = 2'-Fluoro-adenosine
  modified_base 10: mod_base = OTHER; note = 2'-Fluoro-adenosine
  modified_base 11: mod_base = OTHER; note = 2'-Fluoro-uridine
  modified_base 12: mod_base = um
  modified_base 13: mod_base = gm
  modified_base 14: mod_base = um
  modified_base 15: mod_base = gm
  misc_feature 16..18: note = linked via phosphorothioate
  modified_base 16: mod_base = OTHER; note = 2'-O-methyl-adenosine
  modified_base 17: mod_base = cm
  modified_base 18: mod_base = um
  source 1..18: mol_type = other RNA
agtgtgagaattgtgact

SEQ ID NO: 386 - RNA, 20 nt, synthetic construct
  misc_feature 1^2: note = linked via phosphorothioate
  modified_base 1: mod_base = OTHER; note = hexadecanamidodiethoxymethanol-adenosine
  modified_base 2: mod_base = gm
  modified_base 3: mod_base = um
  modified_base 4: mod_base = gm
  modified_base 5: mod_base = um
  modified_base 6: mod_base = gm
  modified_base 7: mod_base = OTHER; note = 2'-O-methyl-adenosine
  modified_base 8: mod_base = OTHER; note = 2'-Fluoro-guanosine
  modified_base 9: mod_base = OTHER; note = 2'-Fluoro-adenosine
  modified_base 10: mod_base = OTHER; note = 2'-Fluoro-adenosine
  modified_base 11: mod_base = OTHER; note = 2'-Fluoro-uridine
  modified_base 12: mod_base = um
  modified_base 13: mod_base = gm
  modified_base 14: mod_base = um
  modified_base 15: mod_base = gm
  modified_base 16: mod_base = OTHER; note = 2'-O-methyl-adenosine
  modified_base 17: mod_base = cm
  misc_feature 18..20: note = linked via phosphorothioate
  modified_base 18: mod_base = um
  modified_base 19: mod_base = gm
  modified_base 20: mod_base = OTHER; note = 2'-O-methyl-adenosine
  source 1..20: mol_type = other RNA
agtgtgagaattgtgactga

SEQ ID NO: 387 - RNA, 22 nt, synthetic construct
  misc_feature 1..4: note = linked via phosphorothioate
  modified_base 1: mod_base = OTHER; note = 4'-O-monomethylphosphonate-2'-O-methylmethyluridine
  modified_base 2: mod_base = OTHER; note = 2'-Fluoro-cytidine
  modified_base 3: mod_base = OTHER; note = 2'-Fluoro-adenosine
  modified_base 4: mod_base = OTHER; note = 2'-Fluoro-guanosine
  modified_base 5: mod_base = OTHER; note = 2'-Fluoro-uridine
  modified_base 6: mod_base = cm
  modified_base 7: mod_base = OTHER; note = 2'-Fluoro-adenosine
  modified_base 8: mod_base = cm
  modified_base 9: mod_base = OTHER; note = 2'-O-methyl-adenosine
  modified_base 10: mod_base = OTHER; note = 2'-Fluoro-adenosine
  modified_base 11: mod_base = um
  modified_base 12: mod_base = um
  modified_base 13: mod_base = cm
  modified_base 14: mod_base = OTHER; note = 2'-Fluoro-uridine
  modified_base 15: mod_base = cm
  modified_base 16: mod_base = OTHER; note = 2'-O-methyl-adenosine
  modified_base 17: mod_base = cm
  modified_base 18: mod_base = OTHER; note = 2'-O-methyl-adenosine
  modified_base 19: mod_base = cm
  misc_feature 20..22: note = linked via phosphorothioate
  modified_base 20: mod_base = um
  modified_base 21: mod_base = gm
  modified_base 22: mod_base = gm
  source 1..22: mol_type = other RNA
tcagtcacaattctcacactgg

SEQ ID NO: 388 - RNA, 22 nt, synthetic construct
  misc_feature 1..4: note = linked via phosphorothioate
  modified_base 1: mod_base = OTHER; note = 4'-O-monomethylphosphonate-2'-O-methylmethyluridine
  modified_base 2: mod_base = OTHER; note = 2'-Fluoro-cytidine
  modified_base 3: mod_base = OTHER; note = 2'-Fluoro-adenosine
  modified_base 4: mod_base = OTHER; note = 2'-Fluoro-guanosine
  modified_base 5: mod_base = OTHER; note = 2'-Fluoro-uridine
  modified_base 6: mod_base = cm
  modified_base 7: mod_base = OTHER; note = 2'-Fluoro-adenosine
  modified_base 8: mod_base = cm
  modified_base 9: mod_base = OTHER; note = 2'-O-methyl-adenosine
  modified_base 10: mod_base = OTHER; note = 2'-Fluoro-adenosine
  modified_base 11: mod_base = um
  modified_base 12: mod_base = um
  modified_base 13: mod_base = cm
  modified_base 14: mod_base = OTHER; note = 2'-Fluoro-uridine
  modified_base 15: mod_base = cm
  modified_base 16: mod_base = OTHER; note = 2'-O-methyl-adenosine
  modified_base 17: mod_base = cm
  modified_base 18: mod_base = OTHER; note = 2'-O-methyl-adenosine
  modified_base 19: mod_base = cm
  misc_feature 20..22: note = linked via phosphorothioate
  modified_base 20: mod_base = um
  modified_base 21: mod_base = gm
  modified_base 22: mod_base = gm
  source 1..22: mol_type = other RNA
tcagtcacaattctcacactgg

SEQ ID NO: 389 - RNA, 22 nt, synthetic construct
  misc_feature 1..4: note = linked via phosphorothioate
  modified_base 1: mod_base = OTHER; note = 4'-O-monomethylphosphonate-2'-O-methylmethyluridine
  modified_base 2: mod_base = OTHER; note = 2'-Fluoro-cytidine
  modified_base 3: mod_base = OTHER; note = 2'-Fluoro-adenosine
  modified_base 4: mod_base = OTHER; note = 2'-Fluoro-guanosine
  modified_base 5: mod_base = OTHER; note = 2'-Fluoro-uridine
  modified_base 6: mod_base = cm
  modified_base 7: mod_base = OTHER; note = 2'-Fluoro-adenosine
  modified_base 8: mod_base = cm
  modified_base 9: mod_base = OTHER; note = 2'-O-methyl-adenosine
  modified_base 10: mod_base = OTHER; note = 2'-Fluoro-adenosine
  modified_base 11: mod_base = um
  modified_base 12: mod_base = um
  modified_base 13: mod_base = cm
  modified_base 14: mod_base = OTHER; note = 2'-Fluoro-uridine
  modified_base 15: mod_base = cm
  modified_base 16: mod_base = OTHER; note = 2'-O-methyl-adenosine
  modified_base 17: mod_base = cm
  modified_base 18: mod_base = OTHER; note = 2'-O-methyl-adenosine
  modified_base 19: mod_base = cm
  misc_feature 20..22: note = linked via phosphorothioate
  modified_base 20: mod_base = um
  modified_base 21: mod_base = gm
  modified_base 22: mod_base = gm
  source 1..22: mol_type = other RNA
tcagtcacaattctcacactgg

SEQ ID NO: 390 - RNA, 20 nt, synthetic construct
  misc_feature 1^2: note = linked via phosphorothioate
  modified_base 1: mod_base = OTHER; note = 2'-Fluoro-adenosine
  modified_base 2: mod_base = OTHER; note = 2'-Fluoro-guanosine
  modified_base 3: mod_base = OTHER; note = 2'-Fluoro-uridine
  modified_base 4: mod_base = cm
  modified_base 5: mod_base = OTHER; note = 2'-Fluoro-adenosine
  modified_base 6: mod_base = cm
  modified_base 7: mod_base = OTHER; note = 2'-O-methyl-adenosine
  modified_base 8: mod_base = OTHER; note = 2'-Fluoro-adenosine
  modified_base 9: mod_base = um
  modified_base 10: mod_base = um
  modified_base 11: mod_base = cm
  modified_base 12: mod_base = OTHER; note = 2'-Fluoro-uridine
  modified_base 13: mod_base = cm
  modified_base 14: mod_base = OTHER; note = 2'-O-methyl-adenosine
  modified_base 15: mod_base = cm
  modified_base 16: mod_base = OTHER; note = 2'-O-methyl-adenosine
  modified_base 17: mod_base = cm
  misc_feature 18..20: note = linked via phosphorothioate
  modified_base 18: mod_base = um
  modified_base 19: mod_base = gm
  modified_base 20: mod_base = gm
  source 1..20: mol_type = other RNA
agtcacaattctcacactgg

SEQ ID NO: 391 - RNA, 22 nt, synthetic construct
  misc_feature 1..4: note = linked via phosphorothioate
  modified_base 1: mod_base = OTHER; note = 4'-O-monomethylphosphonate-2'-O-methylmethyluridine
  modified_base 2: mod_base = OTHER; note = 2'-Fluoro-cytidine
  modified_base 3: mod_base = OTHER; note = 2'-Fluoro-adenosine
  modified_base 4: mod_base = OTHER; note = 2'-Fluoro-guanosine
  modified_base 5: mod_base = OTHER; note = 2'-Fluoro-uridine
  modified_base 6: mod_base = cm
  modified_base 7: mod_base = OTHER; note = 2'-Fluoro-adenosine
  modified_base 8: mod_base = cm
  modified_base 9: mod_base = OTHER; note = 2'-O-methyl-adenosine
  modified_base 10: mod_base = OTHER; note = 2'-Fluoro-adenosine
  modified_base 11: mod_base = um
  modified_base 12: mod_base = um
  modified_base 13: mod_base = cm
  modified_base 14: mod_base = OTHER; note = 2'-Fluoro-uridine
  modified_base 15: mod_base = cm
  modified_base 16: mod_base = OTHER; note = 2'-O-methyl-adenosine
  modified_base 17: mod_base = cm
  modified_base 18: mod_base = OTHER; note = 2'-O-methyl-adenosine
  modified_base 19: mod_base = cm
  misc_feature 20..22: note = linked via phosphorothioate
  modified_base 20: mod_base = um
  modified_base 21: mod_base = gm
  modified_base 22: mod_base = gm
  source 1..22: mol_type = other RNA
tcagtcacaattctcacactgg

SEQ ID NO: 392 - RNA, 20 nt, synthetic construct
  misc_feature 1^2: note = linked via phosphorothioate
  modified_base 1: mod_base = OTHER; note = 2'-Fluoro-adenosine
  modified_base 2: mod_base = OTHER; note = 2'-Fluoro-guanosine
  modified_base 3: mod_base = OTHER; note = 2'-Fluoro-uridine
  modified_base 4: mod_base = cm
  modified_base 5: mod_base = OTHER; note = 2'-Fluoro-adenosine
  modified_base 6: mod_base = cm
  modified_base 7: mod_base = OTHER; note = 2'-O-methyl-adenosine
  modified_base 8: mod_base = OTHER; note = 2'-Fluoro-adenosine
  modified_base 9: mod_base = um
  modified_base 10: mod_base = um
  modified_base 11: mod_base = cm
  modified_base 12: mod_base = OTHER; note = 2'-Fluoro-uridine
  modified_base 13: mod_base = cm
  modified_base 14: mod_base = OTHER; note = 2'-O-methyl-adenosine
  modified_base 15: mod_base = cm
  modified_base 16: mod_base = OTHER; note = 2'-O-methyl-adenosine
  modified_base 17: mod_base = cm
  misc_feature 18..20: note = linked via phosphorothioate
  modified_base 18: mod_base = um
  modified_base 19: mod_base = gm
  modified_base 20: mod_base = gm
  source 1..20: mol_type = other RNA
agtcacaattctcacactgg

SEQ ID NO: 393 - RNA, 22 nt, synthetic construct
  misc_feature 1..4: note = linked via phosphorothioate
  modified_base 1: mod_base = OTHER; note = 4'-O-monomethylphosphonate-2'-O-methylmethyluridine
  modified_base 2: mod_base = OTHER; note = 2'-Fluoro-cytidine
  modified_base 3: mod_base = OTHER; note = 2'-Fluoro-adenosine
  modified_base 4: mod_base = OTHER; note = 2'-Fluoro-guanosine
  modified_base 5: mod_base = OTHER; note = 2'-Fluoro-uridine
  modified_base 6: mod_base = cm
  modified_base 7: mod_base = OTHER; note = 2'-Fluoro-adenosine
  modified_base 8: mod_base = cm
  modified_base 9: mod_base = OTHER; note = 2'-O-methyl-adenosine
  modified_base 10: mod_base = OTHER; note = 2'-Fluoro-adenosine
  modified_base 11: mod_base = um
  modified_base 12: mod_base = um
  modified_base 13: mod_base = cm
  modified_base 14: mod_base = OTHER; note = 2'-Fluoro-uridine
  modified_base 15: mod_base = cm
  modified_base 16: mod_base = OTHER; note = 2'-O-methyl-adenosine
  modified_base 17: mod_base = cm
  modified_base 18: mod_base = OTHER; note = 2'-O-methyl-adenosine
  modified_base 19: mod_base = cm
  misc_feature 20..22: note = linked via phosphorothioate
  modified_base 20: mod_base = um
  modified_base 21: mod_base = gm
  modified_base 22: mod_base = gm
  source 1..22: mol_type = other RNA
tcagtcacaattctcacactgg

SEQ ID NO: 394 - RNA, 20 nt, synthetic construct
  source 1..20: mol_type = other RNA
agtgtgagaattgtgactga

SEQ ID NO: 395 - RNA, 19 nt, synthetic construct
  source 1..19: mol_type = other RNA
agtgtgagaattgtgactg

SEQ ID NO: 396 - RNA, 18 nt, synthetic construct
  source 1..18: mol_type = other RNA
agtgtgagaattgtgact

SEQ ID NO: 397 - RNA, 17 nt, synthetic construct
  source 1..17: mol_type = other RNA
agtgtgagaattgtgac

SEQ ID NO: 398 - RNA, 16 nt, synthetic construct
  source 1..16: mol_type = other RNA
agtgtgagaattgtga

SEQ ID NO: 399 - RNA, 15 nt, synthetic construct
  source 1..15: mol_type = other RNA
agtgtgagaattgtg

SEQ ID NO: 400 - RNA, 14 nt, synthetic construct
  source 1..14: mol_type = other RNA
agtgtgagaattgt

SEQ ID NO: 401 - RNA, 13 nt, synthetic construct
  source 1..13: mol_type = other RNA
agtgtgagaattg

SEQ ID NO: 402 - RNA, 12 nt, synthetic construct
  source 1..12: mol_type = other RNA
agtgtgagaatt

SEQ ID NO: 403 - RNA, 16 nt, synthetic construct
  source 1..16: mol_type = other RNA
agtgtgagaattgtga

SEQ ID NO: 404 - RNA, 15 nt, synthetic construct
  source 1..15: mol_type = other RNA
agtgtgagaattgtg

SEQ ID NO: 405 - RNA, 22 nt, synthetic construct
  source 1..22: mol_type = other RNA
tcagtcacaattctcacactgg

SEQ ID NO: 406 - RNA, 22 nt, synthetic construct
  source 1..22: mol_type = other RNA
tcagtcacaattctcacactgg

SEQ ID NO: 407 - RNA, 22 nt, synthetic construct
  source 1..22: mol_type = other RNA
tcagtcacaattctcacactgg

SEQ ID NO: 408 - RNA, 22 nt, synthetic construct
  source 1..22: mol_type = other RNA
tcagtcacaattctcacactgg

SEQ ID NO: 409 - RNA, 22 nt, synthetic construct
  source 1..22: mol_type = other RNA
tcagtcacaattctcacactgg

SEQ ID NO: 410 - RNA, 22 nt, synthetic construct
  source 1..22: mol_type = other RNA
tcagtcacaattctcacactgg

SEQ ID NO: 411 - RNA, 22 nt, synthetic construct
  source 1..22: mol_type = other RNA
tcagtcacaattctcacactgg

SEQ ID NO: 412 - RNA, 22 nt, synthetic construct
  source 1..22: mol_type = other RNA
tcagtcacaattctcacactgg

SEQ ID NO: 413 - RNA, 22 nt, synthetic construct
  source 1..22: mol_type = other RNA
tcagtcacaattctcacactgg

SEQ ID NO: 414 - RNA, 22 nt, synthetic construct
  source 1..22: mol_type = other RNA
tcagtcacaattctcacactgg

SEQ ID NO: 415 - RNA, 22 nt, synthetic construct
  source 1..22: mol_type = other RNA
tcagtcacaattctcacactgg

SEQ ID NO: 416 - RNA, 20 nt, synthetic construct
  misc_feature 1^2: note = linked via phosphorothioate
  modified_base 1: mod_base = OTHER; note = hexadecanamidodiethoxymethanol-adenosine
  modified_base 2: mod_base = gm
  modified_base 3: mod_base = um
  modified_base 4: mod_base = gm
  modified_base 5: mod_base = um
  modified_base 6: mod_base = gm
  modified_base 7: mod_base = OTHER; note = 2'-O-methyl-adenosine
  modified_base 8: mod_base = OTHER; note = 2'-Fluoro-guanosine
  modified_base 9: mod_base = OTHER; note = 2'-Fluoro-adenosine
  modified_base 10: mod_base = OTHER; note = 2'-Fluoro-adenosine
  modified_base 11: mod_base = OTHER; note = 2'-Fluoro-uridine
  modified_base 12: mod_base = um
  modified_base 13: mod_base = gm
  modified_base 14: mod_base = um
  modified_base 15: mod_base = gm
  modified_base 16: mod_base = OTHER; note = 2'-O-methyl-adenosine
  modified_base 17: mod_base = cm
  misc_feature 18..20: note = linked via phosphorothioate
  modified_base 18: mod_base = um
  modified_base 19: mod_base = gm
  modified_base 20: mod_base = OTHER; note = 2'-O-methyl-adenosine
  source 1..20: mol_type = other RNA
agtgtgagaattgtgactga

SEQ ID NO: 417 - RNA, 19 nt, synthetic construct
  misc_feature 1^2: note = linked via phosphorothioate
  modified_base 1: mod_base = OTHER; note = hexadecanamidodiethoxymethanol-adenosine
  modified_base 2: mod_base = gm
  modified_base 3: mod_base = um
  modified_base 4: mod_base = gm
  modified_base 5: mod_base = um
  modified_base 6: mod_base = gm
  modified_base 7: mod_base = OTHER; note = 2'-O-methyl-adenosine
  modified_base 8: mod_base = OTHER; note = 2'-Fluoro-guanosine
  modified_base 9: mod_base = OTHER; note = 2'-Fluoro-adenosine
  modified_base 10: mod_base = OTHER; note = 2'-Fluoro-adenosine
  modified_base 11: mod_base = OTHER; note = 2'-Fluoro-uridine
  modified_base 12: mod_base = um
  modified_base 13: mod_base = gm
  modified_base 14: mod_base = um
  modified_base 15: mod_base = gm
  modified_base 16: mod_base = OTHER; note = 2'-O-methyl-adenosine
  misc_feature 17..19: note = linked via phosphorothioate
  modified_base 17: mod_base = cm
  modified_base 18: mod_base = um
  modified_base 19: mod_base = gm
  source 1..19: mol_type = other RNA
agtgtgagaattgtgactg

SEQ ID NO: 418 - RNA, 18 nt, synthetic construct
  misc_feature 1^2: note = linked via phosphorothioate
  modified_base 1: mod_base = OTHER; note = hexadecanamidodiethoxymethanol-adenosine
  modified_base 2: mod_base = gm
  modified_base 3: mod_base = um
  modified_base 4: mod_base = gm
  modified_base 5: mod_base = um
  modified_base 6: mod_base = gm
  modified_base 7: mod_base = OTHER; note = 2'-O-methyl-adenosine
  modified_base 8: mod_base = OTHER; note = 2'-Fluoro-guanosine
  modified_base 9: mod_base = OTHER; note = 2'-Fluoro-adenosine
  modified_base 10: mod_base = OTHER; note = 2'-Fluoro-adenosine
  modified_base 11: mod_base = OTHER; note = 2'-Fluoro-uridine
  modified_base 12: mod_base = um
  modified_base 13: mod_base = gm
  modified_base 14: mod_base = um
  modified_base 15: mod_base = gm
  misc_feature 16..18: note = linked via phosphorothioate
  modified_base 16: mod_base = OTHER; note = 2'-O-methyl-adenosine
  modified_base 17: mod_base = cm
  modified_base 18: mod_base = um
  source 1..18: mol_type = other RNA
agtgtgagaattgtgact

SEQ ID NO: 419 - RNA, 17 nt, synthetic construct
  misc_feature 1^2: note = linked via phosphorothioate
  modified_base 1: mod_base = OTHER; note = hexadecanamidodiethoxymethanol-adenosine
  modified_base 2: mod_base = gm
  modified_base 3: mod_base = um
  modified_base 4: mod_base = gm
  modified_base 5: mod_base = um
  modified_base 6: mod_base = gm
  modified_base 7: mod_base = OTHER; note = 2'-O-methyl-adenosine
  modified_base 8: mod_base = OTHER; note = 2'-Fluoro-guanosine
  modified_base 9: mod_base = OTHER; note = 2'-Fluoro-adenosine
  modified_base 10: mod_base = OTHER; note = 2'-Fluoro-adenosine
  modified_base 11: mod_base = OTHER; note = 2'-Fluoro-uridine
  modified_base 12: mod_base = um
  modified_base 13: mod_base = gm
  modified_base 14: mod_base = um
  misc_feature 15..17: note = linked via phosphorothioate
  modified_base 15: mod_base = gm
  modified_base 16: mod_base = OTHER; note = 2'-O-methyl-adenosine
  modified_base 17: mod_base = cm
  source 1..17: mol_type = other RNA
agtgtgagaattgtgac

SEQ ID NO: 420 - RNA, 16 nt, synthetic construct
  misc_feature 1^2: note = linked via phosphorothioate
  modified_base 1: mod_base = OTHER; note = hexadecanamidodiethoxymethanol-adenosine
  modified_base 2: mod_base = gm
  modified_base 3: mod_base = um
  modified_base 4: mod_base = gm
  modified_base 5: mod_base = um
  modified_base 6: mod_base = gm
  modified_base 7: mod_base = OTHER; note = 2'-O-methyl-adenosine
  modified_base 8: mod_base = OTHER; note = 2'-Fluoro-guanosine
  modified_base 9: mod_base = OTHER; note = 2'-Fluoro-adenosine
  modified_base 10: mod_base = OTHER; note = 2'-Fluoro-adenosine
  modified_base 11: mod_base = OTHER; note = 2'-Fluoro-uridine
  modified_base 12: mod_base = um
  modified_base 13: mod_base = gm
  misc_feature 14..16: note = linked via phosphorothioate
  modified_base 14: mod_base = um
  modified_base 15: mod_base = gm
  modified_base 16: mod_base = OTHER; note = 2'-O-methyl-adenosine
  source 1..16: mol_type = other RNA
agtgtgagaattgtga

SEQ ID NO: 421 - RNA, 15 nt, synthetic construct
  misc_feature 1^2: note = linked via phosphorothioate
  modified_base 1: mod_base = OTHER; note = hexadecanamidodiethoxymethanol-adenosine
  modified_base 2: mod_base = gm
  modified_base 3: mod_base = um
  modified_base 4: mod_base = gm
  modified_base 5: mod_base = um
  modified_base 6: mod_base = gm
  modified_base 7: mod_base = OTHER; note = 2'-O-methyl-adenosine
  modified_base 8: mod_base = OTHER; note = 2'-Fluoro-guanosine
  modified_base 9: mod_base = OTHER; note = 2'-Fluoro-adenosine
  modified_base 10: mod_base = OTHER; note = 2'-Fluoro-adenosine
  modified_base 11: mod_base = OTHER; note = 2'-Fluoro-uridine
  modified_base 12: mod_base = um
  misc_feature 13..15: note = linked via phosphorothioate
  modified_base 13: mod_base = gm
  modified_base 14: mod_base = um
  modified_base 15: mod_base = gm
  source 1..15: mol_type = other RNA
agtgtgagaattgtg

SEQ ID NO: 422 - RNA, 14 nt, synthetic construct
  misc_feature 1^2: note = linked via phosphorothioate
  modified_base 1: mod_base = OTHER; note = hexadecanamidodiethoxymethanol-adenosine
  modified_base 2: mod_base = gm
  modified_base 3: mod_base = um
  modified_base 4: mod_base = gm
  modified_base 5: mod_base = um
  modified_base 6: mod_base = gm
  modified_base 7: mod_base = OTHER; note = 2'-O-methyl-adenosine
  modified_base 8: mod_base = OTHER; note = 2'-Fluoro-guanosine
  modified_base 9: mod_base = OTHER; note = 2'-Fluoro-adenosine
  modified_base 10: mod_base = OTHER; note = 2'-Fluoro-adenosine
  modified_base 11: mod_base = OTHER; note = 2'-Fluoro-uridine
  misc_feature 12..14: note = linked via phosphorothioate
  modified_base 12: mod_base = um
  modified_base 13: mod_base = gm
  modified_base 14: mod_base = um
  source 1..14: mol_type = other RNA
agtgtgagaattgt

SEQ ID NO: 423 - RNA, 13 nt, synthetic construct
  misc_feature 1^2: note = linked via phosphorothioate
  modified_base 1: mod_base = OTHER; note = hexadecanamidodiethoxymethanol-adenosine
  modified_base 2: mod_base = gm
  modified_base 3: mod_base = um
  modified_base 4: mod_base = gm
  modified_base 5: mod_base = um
  modified_base 6: mod_base = gm
  modified_base 7: mod_base = OTHER; note = 2'-O-methyl-adenosine
  modified_base 8: mod_base = OTHER; note = 2'-Fluoro-guanosine
  modified_base 9: mod_base = OTHER; note = 2'-Fluoro-adenosine
  modified_base 10: mod_base = OTHER; note = 2'-Fluoro-adenosine
  misc_feature 11..13: note = linked via phosphorothioate
  modified_base 11: mod_base = OTHER; note = 2'-Fluoro-uridine
  modified_base 12: mod_base = um
  modified_base 13: mod_base = gm
  source 1..13: mol_type = other RNA
agtgtgagaattg

SEQ ID NO: 424 - RNA, 12 nt, synthetic construct
  misc_feature 1^2: note = linked via phosphorothioate
  modified_base 1: mod_base = OTHER; note = hexadecanamidodiethoxymethanol-adenosine
  modified_base 2: mod_base = gm
  modified_base 3: mod_base = um
  modified_base 4: mod_base = gm
  modified_base 5: mod_base = um
  modified_base 6: mod_base = gm
  modified_base 7: mod_base = OTHER; note = 2'-O-methyl-adenosine
  modified_base 8: mod_base = OTHER; note = 2'-Fluoro-guanosine
  modified_base 9: mod_base = OTHER; note = 2'-Fluoro-adenosine
  misc_feature 10..12: note = linked via phosphorothioate
  modified_base 10: mod_base = OTHER; note = 2'-Fluoro-adenosine
  modified_base 11: mod_base = OTHER; note = 2'-Fluoro-uridine
  modified_base 12: mod_base = um
  source 1..12: mol_type = other RNA
agtgtgagaatt

SEQ ID NO: 425 - RNA, 16 nt, synthetic construct
  misc_feature 1^2: note = linked via phosphorothioate
  modified_base 1: mod_base = OTHER; note = hexadecanamidodiethoxymethanol-adenosine
  modified_base 2: mod_base = gm
  modified_base 3: mod_base = um
  modified_base 4: mod_base = gm
  modified_base 5: mod_base = um
  modified_base 6: mod_base = gm
  modified_base 7: mod_base = OTHER; note = 2'-O-methyl-adenosine
  modified_base 8: mod_base = OTHER; note = 2'-Fluoro-guanosine
  modified_base 9: mod_base = OTHER; note = 2'-Fluoro-adenosine
  modified_base 10: mod_base = OTHER; note = 2'-Fluoro-adenosine
  modified_base 11: mod_base = OTHER; note = 2'-Fluoro-uridine
  modified_base 12: mod_base = um
  modified_base 13: mod_base = gm
  misc_feature 14..16: note = linked via phosphorothioate
  modified_base 14: mod_base = um
  modified_base 15: mod_base = gm
  modified_base 16: mod_base = OTHER; note = 2'-O-methyl-adenosine
  source 1..16: mol_type = other RNA
agtgtgagaattgtga

SEQ ID NO: 426 - RNA, 15 nt, synthetic construct
  misc_feature 1^2: note = linked via phosphorothioate
  modified_base 1: mod_base = OTHER; note = hexadecanamidodiethoxymethanol-adenosine
  modified_base 2: mod_base = gm
  modified_base 3: mod_base = um
  modified_base 4: mod_base = gm
  modified_base 5: mod_base = um
  modified_base 6: mod_base = gm
  modified_base 7: mod_base = OTHER; note = 2'-O-methyl-adenosine
  modified_base 8: mod_base = OTHER; note = 2'-Fluoro-guanosine
  modified_base 9: mod_base = OTHER; note = 2'-Fluoro-adenosine
  modified_base 10: mod_base = OTHER; note = 2'-Fluoro-adenosine
  modified_base 11: mod_base = OTHER; note = 2'-Fluoro-uridine
  modified_base 12: mod_base = um
  misc_feature 13..15: note = linked via phosphorothioate
  modified_base 13: mod_base = gm
  modified_base 14: mod_base = um
  modified_base 15: mod_base = gm
  source 1..15: mol_type = other RNA
agtgtgagaattgtg

SEQ ID NO: 427 - RNA, 22 nt, synthetic construct
  misc_feature 1..4: note = linked via phosphorothioate
  modified_base 1: mod_base = OTHER; note = 4'-O-monomethylphosphonate-2'-O-methylmethyluridine
  modified_base 2: mod_base = OTHER; note = 2'-Fluoro-cytidine
  modified_base 3: mod_base = OTHER; note = 2'-Fluoro-adenosine
  modified_base 4: mod_base = OTHER; note = 2'-Fluoro-guanosine
  modified_base 5: mod_base = OTHER; note = 2'-Fluoro-uridine
  modified_base 6: mod_base = cm
  modified_base 7: mod_base = OTHER; note = 2'-Fluoro-adenosine
  modified_base 8: mod_base = cm
  modified_base 9: mod_base = OTHER; note = 2'-O-methyl-adenosine
  modified_base 10: mod_base = OTHER; note = 2'-Fluoro-adenosine
  modified_base 11: mod_base = um
  modified_base 12: mod_base = um
  modified_base 13: mod_base = cm
  modified_base 14: mod_base = OTHER; note = 2'-Fluoro-uridine
  modified_base 15: mod_base = cm
  modified_base 16: mod_base = OTHER; note = 2'-O-methyl-adenosine
  modified_base 17: mod_base = cm
  modified_base 18: mod_base = OTHER; note = 2'-O-methyl-adenosine
  modified_base 19: mod_base = cm
  misc_feature 20..22: note = linked via phosphorothioate
  modified_base 20: mod_base = um
  modified_base 21: mod_base = gm
  modified_base 22: mod_base = gm
  source 1..22: mol_type = other RNA
tcagtcacaattctcacactgg

SEQ ID NO: 428 - RNA, 22 nt, synthetic construct
  misc_feature 1..4: note = linked via phosphorothioate
  modified_base 1: mod_base = OTHER; note = 4'-O-monomethylphosphonate-2'-O-methylmethyluridine
  modified_base 2: mod_base = OTHER; note = 2'-Fluoro-cytidine
  modified_base 3: mod_base = OTHER; note = 2'-Fluoro-adenosine
  modified_base 4: mod_base = OTHER; note = 2'-Fluoro-guanosine
  modified_base 5: mod_base = OTHER; note = 2'-Fluoro-uridine
  modified_base 6: mod_base = cm
  modified_base 7: mod_base = OTHER; note = 2'-Fluoro-adenosine
  modified_base 8: mod_base = cm
  modified_base 9: mod_base = OTHER; note = 2'-O-methyl-adenosine
  modified_base 10: mod_base = OTHER; note = 2'-Fluoro-adenosine
  modified_base 11: mod_base = um
  modified_base 12: mod_base = um
  modified_base 13: mod_base = cm
  modified_base 14: mod_base = OTHER; note = 2'-Fluoro-uridine
  modified_base 15: mod_base = cm
  modified_base 16: mod_base = OTHER; note = 2'-O-methyl-adenosine
  modified_base 17: mod_base = cm
  modified_base 18: mod_base = OTHER; note = 2'-O-methyl-adenosine
  modified_base 19: mod_base = cm
  misc_feature 20..22: note = linked via phosphorothioate
  modified_base 20: mod_base = um
  modified_base 21: mod_base = gm
  modified_base 22: mod_base = gm
  source 1..22: mol_type = other RNA
tcagtcacaattctcacactgg

SEQ ID NO: 429 - RNA, 22 nt, synthetic construct
  misc_feature 1..4: note = linked via phosphorothioate
  modified_base 1: mod_base = OTHER; note = 4'-O-monomethylphosphonate-2'-O-methylmethyluridine
  modified_base 2: mod_base = OTHER; note = 2'-Fluoro-cytidine
  modified_base 3: mod_base = OTHER; note = 2'-Fluoro-adenosine
  modified_base 4: mod_base = OTHER; note = 2'-Fluoro-guanosine
  modified_base 5: mod_base = OTHER; note = 2'-Fluoro-uridine
  modified_base 6: mod_base = cm
  modified_base 7: mod_base = OTHER; note = 2'-Fluoro-adenosine
  modified_base 8: mod_base = cm
  modified_base 9: mod_base = OTHER; note = 2'-O-methyl-adenosine
  modified_base 10: mod_base = OTHER; note = 2'-Fluoro-adenosine
  modified_base 11: mod_base = um
  modified_base 12: mod_base = um
  modified_base 13: mod_base = cm
  modified_base 14: mod_base = OTHER; note = 2'-Fluoro-uridine
  modified_base 15: mod_base = cm
  modified_base 16: mod_base = OTHER; note = 2'-O-methyl-adenosine
  modified_base 17: mod_base = cm
  modified_base 18: mod_base = OTHER; note = 2'-O-methyl-adenosine
  modified_base 19: mod_base = cm
  misc_feature 20..22: note = linked via phosphorothioate
  modified_base 20: mod_base = um
  modified_base 21: mod_base = gm
  modified_base 22: mod_base = gm
  source 1..22: mol_type = other RNA
tcagtcacaattctcacactgg

SEQ ID NO: 430 - RNA, 22 nt, synthetic construct
  misc_feature 1..4: note = linked via phosphorothioate
  modified_base 1: mod_base = OTHER; note = 4'-O-monomethylphosphonate-2'-O-methylmethyluridine
  modified_base 2: mod_base = OTHER; note = 2'-Fluoro-cytidine
  modified_base 3: mod_base = OTHER; note = 2'-Fluoro-adenosine
  modified_base 4: mod_base = OTHER; note = 2'-Fluoro-guanosine
  modified_base 5: mod_base = OTHER; note = 2'-Fluoro-uridine
  modified_base 6: mod_base = cm
  modified_base 7: mod_base = OTHER; note = 2'-Fluoro-adenosine
  modified_base 8: mod_base = cm
  modified_base 9: mod_base = OTHER; note = 2'-O-methyl-adenosine
  modified_base 10: mod_base = OTHER; note = 2'-Fluoro-adenosine
  modified_base 11: mod_base = um
  modified_base 12: mod_base = um
  modified_base 13: mod_base = cm
  modified_base 14: mod_base = OTHER; note = 2'-Fluoro-uridine
  modified_base 15: mod_base = cm
  modified_base 16: mod_base = OTHER; note = 2'-O-methyl-adenosine
  modified_base 17: mod_base = cm
  modified_base 18: mod_base = OTHER; note = 2'-O-methyl-adenosine
  modified_base 19: mod_base = cm
  misc_feature 20..22: note = linked via phosphorothioate
  modified_base 20: mod_base = um
  modified_base 21: mod_base = gm
  modified_base 22: mod_base = gm
  source 1..22: mol_type = other RNA
tcagtcacaattctcacactgg

SEQ ID NO: 431 - RNA, 22 nt, synthetic construct
  misc_feature 1..4: note = linked via phosphorothioate
  modified_base 1: mod_base = OTHER; note = 4'-O-monomethylphosphonate-2'-O-methylmethyluridine
  modified_base 2: mod_base = OTHER; note = 2'-Fluoro-cytidine
  modified_base 3: mod_base = OTHER; note = 2'-Fluoro-adenosine
  modified_base 4: mod_base = OTHER; note = 2'-Fluoro-guanosine
  modified_base 5: mod_base = OTHER; note = 2'-Fluoro-uridine
  modified_base 6: mod_base = cm
  modified_base 7: mod_base = OTHER; note = 2'-Fluoro-adenosine
  modified_base 8: mod_base = cm
  modified_base 9: mod_base = OTHER; note = 2'-O-methyl-adenosine
  modified_base 10: mod_base = OTHER; note = 2'-Fluoro-adenosine
  modified_base 11: mod_base = um
  modified_base 12: mod_base = um
  modified_base 13: mod_base = cm
  modified_base 14: mod_base = OTHER; note = 2'-Fluoro-uridine
  modified_base 15: mod_base = cm
  modified_base 16: mod_base = OTHER; note = 2'-O-methyl-adenosine
  modified_base 17: mod_base = cm
  modified_base 18: mod_base = OTHER; note = 2'-O-methyl-adenosine
  modified_base 19: mod_base = cm
  misc_feature 20..22: note = linked via phosphorothioate
  modified_base 20: mod_base = um
  modified_base 21: mod_base = gm
  modified_base 22: mod_base = gm
  source 1..22: mol_type = other RNA
tcagtcacaattctcacactgg

SEQ ID NO: 432 - RNA, 22 nt, synthetic construct
  misc_feature 1..4: note = linked via phosphorothioate
  modified_base 1: mod_base = OTHER; note = 4'-O-monomethylphosphonate-2'-O-methylmethyluridine
  modified_base 2: mod_base = OTHER; note = 2'-Fluoro-cytidine
  modified_base 3: mod_base = OTHER; note = 2'-Fluoro-adenosine
  modified_base 4: mod_base = OTHER; note = 2'-Fluoro-guanosine
  modified_base 5: mod_base = OTHER; note = 2'-Fluoro-uridine
  modified_base 6: mod_base = cm
  modified_base 7: mod_base = OTHER; note = 2'-Fluoro-adenosine
  modified_base 8: mod_base = cm
  modified_base 9: mod_base = OTHER; note = 2'-O-methyl-adenosine
  modified_base 10: mod_base = OTHER; note = 2'-Fluoro-adenosine
  modified_base 11: mod_base = um
  modified_base 12: mod_base = um
  modified_base 13: mod_base = cm
  modified_base 14: mod_base = OTHER; note = 2'-Fluoro-uridine
  modified_base 15: mod_base = cm
  modified_base 16: mod_base = OTHER; note = 2'-O-methyl-adenosine
  modified_base 17: mod_base = cm
  modified_base 18: mod_base = OTHER; note = 2'-O-methyl-adenosine
  modified_base 19: mod_base = cm
  misc_feature 20..22: note = linked via phosphorothioate
  modified_base 20: mod_base = um
  modified_base 21: mod_base = gm
  modified_base 22: mod_base = gm
  source 1..22: mol_type = other RNA
tcagtcacaattctcacactgg

SEQ ID NO: 433 - RNA, 22 nt, synthetic construct
  misc_feature 1..4: note = linked via phosphorothioate
  modified_base 1: mod_base = OTHER; note = 4'-O-monomethylphosphonate-2'-O-methylmethyluridine
  modified_base 2: mod_base = OTHER; note = 2'-Fluoro-cytidine
  modified_base 3: mod_base = OTHER; note = 2'-Fluoro-adenosine
  modified_base 4: mod_base = OTHER; note = 2'-Fluoro-guanosine
  modified_base 5: mod_base = OTHER; note = 2'-Fluoro-uridine
  modified_base 6: mod_base = cm
  modified_base 7: mod_base = OTHER; note = 2'-Fluoro-adenosine
  modified_base 8: mod_base = cm
  modified_base 9: mod_base = OTHER; note = 2'-O-methyl-adenosine
  modified_base 10: mod_base = OTHER; note = 2'-Fluoro-adenosine
  modified_base 11: mod_base = um
  modified_base 12: mod_base = um
  modified_base 13: mod_base = cm
  modified_base 14: mod_base = OTHER; note = 2'-Fluoro-uridine
  modified_base 15: mod_base = cm
  modified_base 16: mod_base = OTHER; note = 2'-O-methyl-adenosine
  modified_base 17: mod_base = cm
  modified_base 18: mod_base = OTHER; note = 2'-O-methyl-adenosine
  modified_base 19: mod_base = cm
  misc_feature 20..22: note = linked via phosphorothioate
  modified_base 20: mod_base = um
  modified_base 21: mod_base = gm
  modified_base 22: mod_base = gm
  source 1..22: mol_type = other RNA
tcagtcacaattctcacactgg

SEQ ID NO: 434 - RNA, 22 nt, synthetic construct
  misc_feature 1..4: note = linked via phosphorothioate
  modified_base 1: mod_base = OTHER; note = 4'-O-monomethylphosphonate-2'-O-methylmethyluridine
  modified_base 2: mod_base = OTHER; note = 2'-Fluoro-cytidine
  modified_base 3: mod_base = OTHER; note = 2'-Fluoro-adenosine
  modified_base 4: mod_base = OTHER; note = 2'-Fluoro-guanosine
  modified_base 5: mod_base = OTHER; note = 2'-Fluoro-uridine
  modified_base 6: mod_base = cm
  modified_base 7: mod_base = OTHER; note = 2'-Fluoro-adenosine
  modified_base 8: mod_base = cm
  modified_base 9: mod_base = OTHER; note = 2'-O-methyl-adenosine
  modified_base 10: mod_base = OTHER; note = 2'-Fluoro-adenosine
  modified_base 11: mod_base = um
  modified_base 12: mod_base = um
  modified_base 13: mod_base = cm
  modified_base 14: mod_base = OTHER; note = 2'-Fluoro-uridine
  modified_base 15: mod_base = cm
  modified_base 16: mod_base = OTHER; note = 2'-O-methyl-adenosine
  modified_base 17: mod_base = cm
  modified_base 18: mod_base = OTHER; note = 2'-O-methyl-adenosine
  modified_base 19: mod_base = cm
  misc_feature 20..22: note = linked via phosphorothioate
  modified_base 20: mod_base = um
  modified_base 21: mod_base = gm
  modified_base 22: mod_base = gm
  source 1..22: mol_type = other RNA
tcagtcacaattctcacactgg

SEQ ID NO: 435 - RNA, 22 nt, synthetic construct
  misc_feature 1..4: note = linked via phosphorothioate
  modified_base 1: mod_base = OTHER; note = 4'-O-monomethylphosphonate-2'-O-methylmethyluridine
  modified_base 2: mod_base = OTHER; note = 2'-Fluoro-cytidine
  modified_base 3: mod_base = OTHER; note = 2'-Fluoro-adenosine
  modified_base 4: mod_base = OTHER; note = 2'-Fluoro-guanosine
  modified_base 5: mod_base = OTHER; note = 2'-Fluoro-uridine
  modified_base 6: mod_base = cm
  modified_base 7: mod_base = OTHER; note = 2'-Fluoro-adenosine
  modified_base 8: mod_base = cm
  modified_base 9: mod_base = OTHER; note = 2'-O-methyl-adenosine
  modified_base 10: mod_base = OTHER; note = 2'-Fluoro-adenosine
  modified_base 11: mod_base = um
  modified_base 12: mod_base = um
  modified_base 13: mod_base = cm
  modified_base 14: mod_base = OTHER; note = 2'-Fluoro-uridine
  modified_base 15: mod_base = cm
  modified_base 16: mod_base = OTHER; note = 2'-O-methyl-adenosine
  modified_base 17: mod_base = cm
  modified_base 18: mod_base = OTHER; note = 2'-O-methyl-adenosine
  modified_base 19: mod_base = cm
  misc_feature 20..22: note = linked via phosphorothioate
  modified_base 20: mod_base = um
  modified_base 21: mod_base = gm
  modified_base 22: mod_base = gm
  source 1..22: mol_type = other RNA
tcagtcacaattctcacactgg

SEQ ID NO: 436 - RNA, 22 nt, synthetic construct
  misc_feature 1..5: note = linked via phosphorothioate
  modified_base 1: mod_base = OTHER; note = 4'-O-monomethylphosphonate-2'-O-methylmethyluridine
  modified_base 2: mod_base = OTHER; note = 2'-Fluoro-cytidine
  modified_base 3: mod_base = OTHER; note = 2'-Fluoro-adenosine
  modified_base 4: mod_base = OTHER; note = 2'-Fluoro-guanosine
  modified_base 5: mod_base = OTHER; note = 2'-Fluoro-uridine
  modified_base 6: mod_base = cm
  modified_base 7: mod_base = OTHER; note = 2'-Fluoro-adenosine
  modified_base 8: mod_base = cm
  modified_base 9: mod_base = OTHER; note = 2'-O-methyl-adenosine
  modified_base 10: mod_base = OTHER; note = 2'-Fluoro-adenosine
  modified_base 11: mod_base = um
  modified_base 12: mod_base = um
  modified_base 13: mod_base = cm
  modified_base 14: mod_base = OTHER; note = 2'-Fluoro-uridine
  modified_base 15: mod_base = cm
  modified_base 16: mod_base = OTHER; note = 2'-O-methyl-adenosine
  modified_base 17: mod_base = cm
  modified_base 18: mod_base = OTHER; note = 2'-O-methyl-adenosine
  modified_base 19: mod_base = cm
  misc_feature 20..22: note = linked via phosphorothioate
  modified_base 20: mod_base = um
  modified_base 21: mod_base = gm
  modified_base 22: mod_base = gm
  source 1..22: mol_type = other RNA
tcagtcacaattctcacactgg

SEQ ID NO: 437 - RNA, 22 nt, synthetic construct
  misc_feature 1..5: note = linked via phosphorothioate
  modified_base 1: mod_base = OTHER; note = 4'-O-monomethylphosphonate-2'-O-methylmethyluridine
  modified_base 2: mod_base = OTHER; note = 2'-Fluoro-cytidine
  modified_base 3: mod_base = OTHER; note = 2'-Fluoro-adenosine
  modified_base 4: mod_base = OTHER; note = 2'-Fluoro-guanosine
  modified_base 5: mod_base = OTHER; note = 2'-Fluoro-uridine
  modified_base 6: mod_base = cm
  modified_base 7: mod_base = OTHER; note = 2'-Fluoro-adenosine
  modified_base 8: mod_base = cm
  modified_base 9: mod_base = OTHER; note = 2'-O-methyl-adenosine
  modified_base 10: mod_base = OTHER; note = 2'-Fluoro-adenosine
  modified_base 11: mod_base = um
  modified_base 12: mod_base = um
  modified_base 13: mod_base = cm
  modified_base 14: mod_base = OTHER; note = 2'-Fluoro-uridine
  modified_base 15: mod_base = cm
  modified_base 16: mod_base = OTHER; note = 2'-O-methyl-adenosine
  modified_base 17: mod_base = cm
  modified_base 18: mod_base = OTHER; note = 2'-O-methyl-adenosine
  modified_base 19: mod_base = cm
  misc_feature 20..22: note = linked via phosphorothioate
  modified_base 20: mod_base = um
  modified_base 21: mod_base = gm
  modified_base 22: mod_base = gm
  source 1..22: mol_type = other RNA
tcagtcacaattctcacactgg

SEQ ID NO: 438 - RNA, 20 nt, synthetic construct
  source 1..20: mol_type = other RNA
agtgtgagaattgtgactga

SEQ ID NO: 439 - DNA, 20 bp, synthetic construct
  misc_feature 1..17: note = RNA fragment
  misc_feature 18: note = DNA fragment
  misc_feature 19..20: note = RNA fragment
  source 1..20: mol_type = other DNA
agtgtgagaattgtgactga

SEQ ID NO: 440 - DNA, 19 bp, synthetic construct
  misc_feature 1..17: note = RNA fragment
  misc_feature 18: note = DNA fragment
  misc_feature 19: note = RNA fragment
  source 1..19: mol_type = other DNA
agtgtgagaattgtgactg

SEQ ID NO: 441 - DNA, 18 bp, synthetic construct
  misc_feature 1..17: note = RNA fragment
  misc_feature 18: note = DNA fragment
  source 1..18: mol_type = other DNA
agtgtgagaattgtgact

SEQ ID NO: 442 - RNA, 17 nt, synthetic construct
  source 1..17: mol_type = other RNA
agtgtgagaattgtgac

SEQ ID NO: 443 - RNA, 16 nt, synthetic construct
  source 1..16: mol_type = other RNA
agtgtgagaattgtga

SEQ ID NO: 444 - RNA, 15 nt, synthetic construct
  source 1..15: mol_type = other RNA
agtgtgagaattgtg

SEQ ID NO: 445 - RNA, 14 nt, synthetic construct
  source 1..14: mol_type = other RNA
agtgtgagaattgt

SEQ ID NO: 446 - RNA, 13 nt, synthetic construct
  source 1..13: mol_type = other RNA
agtgtgagaattg

SEQ ID NO: 447 - RNA, 12 nt, synthetic construct
  source 1..12: mol_type = other RNA
agtgtgagaatt

SEQ ID NO: 448 - RNA, 16 nt, synthetic construct
  source 1..16: mol_type = other RNA
agtgtgagaattgtga

SEQ ID NO: 449 - RNA, 22 nt, synthetic construct
  source 1..22: mol_type = other RNA
tcagtcacaattctcacactgg

SEQ ID NO: 450 - RNA, 22 nt, synthetic construct
  source 1..22: mol_type = other RNA
tcagtcacaattctcacactgg

SEQ ID NO: 451 - RNA, 22 nt, synthetic construct
  source 1..22: mol_type = other RNA
tcagtcacaattctcacactgg

SEQ ID NO: 452 - RNA, 22 nt, synthetic construct
  source 1..22: mol_type = other RNA
tcagtcacaattctcacactgg

SEQ ID NO: 453 - RNA, 22 nt, synthetic construct
  source 1..22: mol_type = other RNA
tcagtcacaattctcacactgg

SEQ ID NO: 454 - RNA, 22 nt, synthetic construct
  source 1..22: mol_type = other RNA
tcagtcacaattctcacactgg

SEQ ID NO: 455 - RNA, 22 nt, synthetic construct
  source 1..22: mol_type = other RNA
tcagtcacaattctcacactgg

SEQ ID NO: 456 - RNA, 22 nt, synthetic construct
  source 1..22: mol_type = other RNA
tcagtcacaattctcacactgg

SEQ ID NO: 457 - RNA, 22 nt, synthetic construct
  source 1..22: mol_type = other RNA
tcagtcacaattctcacactgg

SEQ ID NO: 458 - RNA, 22 nt, synthetic construct
  source 1..22: mol_type = other RNA
tcagtcacaattctcacactgg

SEQ ID NO: 459 - RNA, 22 nt, synthetic construct
  source 1..22: mol_type = other RNA
tcagtcacaattctcacactgg

SEQ ID NO: 460 - RNA, 20 nt, synthetic construct
  misc_feature 1^2: note = linked via phosphorothioate
  modified_base 1: mod_base = OTHER; note = hexadecanamidodiethoxymethanol-adenosine
  modified_base 2: mod_base = gm
  modified_base 3: mod_base = um
  modified_base 4: mod_base = gm
  modified_base 5: mod_base = um
  modified_base 6: mod_base = gm
  modified_base 7: mod_base = OTHER; note = 2'-O-methyl-adenosine
  modified_base 8: mod_base = OTHER; note = 2'-Fluoro-guanosine
  modified_base 9: mod_base = OTHER; note = 2'-Fluoro-adenosine
  modified_base 10: mod_base = OTHER; note = 2'-Fluoro-adenosine
  modified_base 11: mod_base = OTHER; note = 2'-Fluoro-uridine
  modified_base 12: mod_base = um
  modified_base 13: mod_base = gm
  modified_base 14: mod_base = um
  modified_base 15: mod_base = gm
  modified_base 16: mod_base = OTHER; note = 2'-O-methyl-adenosine
  modified_base 17: mod_base = cm
  misc_feature 18..20: note = linked via phosphorothioate
  modified_base 18: mod_base = um
  modified_base 19: mod_base = gm
  modified_base 20: mod_base = OTHER; note = 2'-O-methyl-adenosine
  source 1..20: mol_type = other RNA
agtgtgagaattgtgactga

SEQ ID NO: 461 - DNA, 20 bp, synthetic construct
  misc_feature 1..17: note = RNA fragment
  misc_feature 18: note = DNA fragment
  misc_feature 19..20: note = RNA fragment
  misc_feature 1^2: note = linked via phosphorothioate
  modified_base 1: mod_base = OTHER; note = hexadecanamidodiethoxymethanol-adenosine
  modified_base 2: mod_base = OTHER; note = 2'-O,4'-C-Methyleneguanosine
  modified_base 3: mod_base = um
  modified_base 4: mod_base = gm
  modified_base 5: mod_base = um
  modified_base 6: mod_base = gm
  modified_base 7: mod_base = OTHER; note = 2'-O-methyl-adenosine
  modified_base 8: mod_base = OTHER; note = 2'-Fluoro-guanosine
  modified_base 9: mod_base = OTHER; note = 2'-Fluoro-adenosine
  modified_base 10: mod_base = OTHER; note = 2'-Fluoro-adenosine
  modified_base 11: mod_base = OTHER; note = 2'-Fluoro-uridine
  modified_base 12: mod_base = um
  modified_base 13: mod_base = gm
  modified_base 14: mod_base = um
  modified_base 15: mod_base = OTHER; note = 2'-O,4'-C-Methyleneguanosine
  modified_base 16: mod_base = OTHER; note = 2'-O,4'-C-Methyleneadenosine
  modified_base 17: mod_base = cm
  misc_feature 18..20: note = linked via phosphorothioate
  modified_base 18: mod_base = OTHER; note = 2'-O,4'-C-Methylenethymine
  modified_base 19: mod_base = OTHER; note = 2'-O,4'-C-Methyleneguanosine
  modified_base 20: mod_base = OTHER; note = 2'-O-methyl-adenosine
  source 1..20: mol_type = other DNA
agtgtgagaattgtgactga

SEQ ID NO: 462 - DNA, 19 bp, synthetic construct
  misc_feature 1..17: note = RNA fragment
  misc_feature 18: note = DNA fragment
  misc_feature 19: note = RNA fragment
  misc_feature 1^2: note = linked via phosphorothioate
  modified_base 1: mod_base = OTHER; note = hexadecanamidodiethoxymethanol-adenosine
  modified_base 2: mod_base = OTHER; note = 2'-O,4'-C-Methyleneguanosine
  modified_base 3: mod_base = um
  modified_base 4: mod_base = gm
  modified_base 5: mod_base = um
  modified_base 6: mod_base = gm
  modified_base 7: mod_base = OTHER; note = 2'-O-methyl-adenosine
  modified_base 8: mod_base = OTHER; note = 2'-Fluoro-guanosine
  modified_base 9: mod_base = OTHER; note = 2'-Fluoro-adenosine
  modified_base 10: mod_base = OTHER; note = 2'-Fluoro-adenosine
  modified_base 11: mod_base = OTHER; note = 2'-Fluoro-uridine
  modified_base 12: mod_base = um
  modified_base 13: mod_base = gm
  modified_base 14: mod_base = um
  modified_base 15: mod_base = OTHER; note = 2'-O,4'-C-Methyleneguanosine
  modified_base 16: mod_base = OTHER; note = 2'-O,4'-C-Methyleneadenosine
  misc_feature 17..19: note = linked via phosphorothioate
  modified_base 17: mod_base = cm
  modified_base 18: mod_base = OTHER; note = 2'-O,4'-C-Methylenethymine
  modified_base 19: mod_base = OTHER; note = 2'-O,4'-C-Methyleneguanosine
  source 1..19: mol_type = other DNA
agtgtgagaattgtgactg

SEQ ID NO: 463 - DNA, 18 bp, synthetic construct
  misc_feature 1..17: note = RNA fragment
  misc_feature 18: note = DNA fragment
  misc_feature 1^2: note = linked via phosphorothioate
  modified_base 1: mod_base = OTHER; note = hexadecanamidodiethoxymethanol-adenosine
  modified_base 2: mod_base = OTHER; note = 2'-O,4'-C-Methyleneguanosine
  modified_base 3: mod_base = um
  modified_base 4: mod_base = gm
  modified_base 5: mod_base = um
  modified_base 6: mod_base = gm
  modified_base 7: mod_base = OTHER; note = 2'-O-methyl-adenosine
  modified_base 8: mod_base = OTHER; note = 2'-Fluoro-guanosine
  modified_base 9: mod_base = OTHER; note = 2'-Fluoro-adenosine
  modified_base 10: mod_base = OTHER; note = 2'-Fluoro-adenosine
  modified_base 11: mod_base = OTHER; note = 2'-Fluoro-uridine
  modified_base 12: mod_base = um
  modified_base 13: mod_base = gm
  modified_base 14: mod_base = um
  modified_base 15: mod_base = OTHER; note = 2'-O,4'-C-Methyleneguanosine
  misc_feature 16..18: note = linked via phosphorothioate
  modified_base 16: mod_base = OTHER; note = 2'-O,4'-C-Methyleneadenosine
  modified_base 17: mod_base = cm
  modified_base 18: mod_base = OTHER; note = 2'-O,4'-C-Methylenethymine
  source 1..18: mol_type = other DNA
agtgtgagaattgtgact

SEQ ID NO: 464 - RNA, 17 nt, synthetic construct
  misc_feature 1^2: note = linked via phosphorothioate
  modified_base 1: mod_base = OTHER; note = hexadecanamidodiethoxymethanol-adenosine
  modified_base 2: mod_base = OTHER; note = 2'-O,4'-C-Methyleneguanosine
  modified_base 3: mod_base = um
  modified_base 4: mod_base = gm
  modified_base 5: mod_base = um
  modified_base 6: mod_base = gm
  modified_base 7: mod_base = OTHER; note = 2'-O-methyl-adenosine
  modified_base 8: mod_base = OTHER; note = 2'-Fluoro-guanosine
  modified_base 9: mod_base = OTHER; note = 2'-Fluoro-adenosine
  modified_base 10: mod_base = OTHER; note = 2'-Fluoro-adenosine
  modified_base 11: mod_base = OTHER; note = 2'-Fluoro-uridine
  modified_base 12: mod_base = um
  modified_base 13: mod_base = gm
  modified_base 14: mod_base = um
  misc_feature 15..17: note = linked via phosphorothioate
  modified_base 15: mod_base = OTHER; note = 2'-O,4'-C-Methyleneguanosine
  modified_base 16: mod_base = OTHER; note = 2'-O,4'-C-Methyleneadenosine
  modified_base 17: mod_base = cm
  source 1..17: mol_type = other RNA
agtgtgagaattgtgac

SEQ ID NO: 465 - RNA, 16 nt, synthetic construct
  misc_feature 1^2: note = linked via phosphorothioate
  modified_base 1: mod_base = OTHER; note = hexadecanamidodiethoxymethanol-adenosine
  modified_base 2: mod_base = OTHER; note = 2'-O,4'-C-Methyleneguanosine
  modified_base 3: mod_base = um
  modified_base 4: mod_base = gm
  modified_base 5: mod_base = um
  modified_base 6: mod_base = gm
  modified_base 7: mod_base = OTHER; note = 2'-O-methyl-adenosine
  modified_base 8: mod_base = OTHER; note = 2'-Fluoro-guanosine
  modified_base 9: mod_base = OTHER; note = 2'-Fluoro-adenosine
  modified_base 10: mod_base = OTHER; note = 2'-Fluoro-adenosine
  modified_base 11: mod_base = OTHER; note = 2'-Fluoro-uridine
  modified_base 12: mod_base = um
  modified_base 13: mod_base = gm
  misc_feature 14..16: note = linked via phosphorothioate
  modified_base 14: mod_base = um
  modified_base 15: mod_base = OTHER; note = 2'-O,4'-C-Methyleneguanosine
  modified_base 16: mod_base = OTHER; note = 2'-O,4'-C-Methyleneadenosine
  source 1..16: mol_type = other RNA
agtgtgagaattgtga

SEQ ID NO: 466 - RNA, 15 nt, synthetic construct
  misc_feature 1^2: note = linked via phosphorothioate
  modified_base 1: mod_base = OTHER; note = hexadecanamidodiethoxymethanol-adenosine
  modified_base 2: mod_base = OTHER; note = 2'-O,4'-C-Methyleneguanosine
  modified_base 3: mod_base = um
  modified_base 4: mod_base = gm
  modified_base 5: mod_base = um
  modified_base 6: mod_base = gm
  modified_base 7: mod_base = OTHER; note = 2'-O-methyl-adenosine
  modified_base 8: mod_base = OTHER; note = 2'-Fluoro-guanosine
  modified_base 9: mod_base = OTHER; note = 2'-Fluoro-adenosine
  modified_base 10: mod_base = OTHER; note = 2'-Fluoro-adenosine
  modified_base 11: mod_base = OTHER; note = 2'-Fluoro-uridine
  modified_base 12: mod_base = um
  misc_feature 13..15: note = linked via phosphorothioate
  modified_base 13: mod_base = gm
  modified_base 14: mod_base = um
  modified_base 15: mod_base = OTHER; note = 2'-O,4'-C-Methyleneguanosine
  source 1..15: mol_type = other RNA
agtgtgagaattgtg

SEQ ID NO: 467 - RNA, 14 nt, synthetic construct
  misc_feature 1^2: note = linked via phosphorothioate
  modified_base 1: mod_base = OTHER; note = hexadecanamidodiethoxymethanol-adenosine
  modified_base 2: mod_base = OTHER; note = 2'-O,4'-C-Methyleneguanosine
  modified_base 3: mod_base = um
  modified_base 4: mod_base = gm
  modified_base 5: mod_base = um
  modified_base 6: mod_base = gm
  modified_base 7: mod_base = OTHER; note = 2'-O-methyl-adenosine
  modified_base 8: mod_base = OTHER; note = 2'-Fluoro-guanosine
  modified_base 9: mod_base = OTHER; note = 2'-Fluoro-adenosine
  modified_base 10: mod_base = OTHER; note = 2'-Fluoro-adenosine
  modified_base 11: mod_base = OTHER; note = 2'-Fluoro-uridine
  misc_feature 12..14: note = linked via phosphorothioate
  modified_base 12: mod_base = um
  modified_base 13: mod_base = gm
  modified_base 14: mod_base = um
  source 1..14: mol_type = other RNA
agtgtgagaattgt

SEQ ID NO: 468 - RNA, 13 nt, synthetic construct
  misc_feature 1^2: note = linked via phosphorothioate
  modified_base 1: mod_base = OTHER; note = hexadecanamidodiethoxymethanol-adenosine
  modified_base 2: mod_base = OTHER; note = 2'-O,4'-C-Methyleneguanosine
  modified_base 3: mod_base = um
  modified_base 4: mod_base = gm
  modified_base 5: mod_base = um
  modified_base 6: mod_base = gm
  modified_base 7: mod_base = OTHER; note = 2'-O-methyl-adenosine
  modified_base 8: mod_base = OTHER; note = 2'-Fluoro-guanosine
  modified_base 9: mod_base = OTHER; note = 2'-Fluoro-adenosine
  modified_base 10: mod_base = OTHER; note = 2'-Fluoro-adenosine
  misc_feature 11..13: note = linked via phosphorothioate
  modified_base 11: mod_base = OTHER; note = 2'-Fluoro-uridine
  modified_base 12: mod_base = um
  modified_base 13: mod_base = gm
  source 1..13: mol_type = other RNA
agtgtgagaattg

SEQ ID NO: 469 - RNA, 12 nt, synthetic construct
  misc_feature 1^2: note = linked via phosphorothioate
  modified_base 1: mod_base = OTHER; note = hexadecanamidodiethoxymethanol-adenosine
  modified_base 2: mod_base = OTHER; note = 2'-O,4'-C-Methyleneguanosine
  modified_base 3: mod_base = um
  modified_base 4: mod_base = gm
  modified_base 5: mod_base = um
  modified_base 6: mod_base = gm
  modified_base 7: mod_base = OTHER; note = 2'-O-methyl-adenosine
  modified_base 8: mod_base = OTHER; note = 2'-Fluoro-guanosine
  modified_base 9: mod_base = OTHER; note = 2'-Fluoro-adenosine
  misc_feature 10..12: note = linked via phosphorothioate
  modified_base 10: mod_base = OTHER; note = 2'-Fluoro-adenosine
  modified_base 11: mod_base = OTHER; note = 2'-Fluoro-uridine
  modified_base 12: mod_base = um
  source 1..12: mol_type = other RNA
agtgtgagaatt

SEQ ID NO: 470 - RNA, 16 nt, synthetic construct
  misc_feature 1^2: note = linked via phosphorothioate
  modified_base 1: mod_base = OTHER; note = hexadecanamidodiethoxymethanol-adenosine
  modified_base 2: mod_base = OTHER; note = 2'-O,4'-C-Methyleneguanosine
  modified_base 3: mod_base = um
  modified_base 4: mod_base = gm
  modified_base 5: mod_base = um
  modified_base 6: mod_base = gm
  modified_base 7: mod_base = OTHER; note = 2'-O-methyl-adenosine
  modified_base 8: mod_base = OTHER; note = 2'-Fluoro-guanosine
  modified_base 9: mod_base = OTHER; note = 2'-Fluoro-adenosine
  modified_base 10: mod_base = OTHER; note = 2'-Fluoro-adenosine
  modified_base 11: mod_base = OTHER; note = 2'-Fluoro-uridine
  modified_base 12: mod_base = um
  modified_base 13: mod_base = gm
  misc_feature 14..16: note = linked via phosphorothioate
  modified_base 14: mod_base = um
  modified_base 15: mod_base = OTHER; note = 2'-O,4'-C-Methyleneguanosine
  modified_base 16: mod_base = OTHER; note = 2'-O,4'-C-Methyleneadenosine
  source 1..16: mol_type = other RNA
agtgtgagaattgtga

SEQ ID NO: 471 - RNA, 22 nt, synthetic construct
  misc_feature 1..4: note = linked via phosphorothioate
  modified_base 1: mod_base = OTHER; note = 4'-O-monomethylphosphonate-2'-O-methylmethyluridine
  modified_base 2: mod_base = OTHER; note = 2'-Fluoro-cytidine
  modified_base 3: mod_base = OTHER; note = 2'-Fluoro-adenosine
  modified_base 4: mod_base = OTHER; note = 2'-Fluoro-guanosine
  modified_base 5: mod_base = OTHER; note = 2'-Fluoro-uridine
  modified_base 6: mod_base = cm
  modified_base 7: mod_base = OTHER; note = 2'-Fluoro-adenosine
  modified_base 8: mod_base = cm
  modified_base 9: mod_base = OTHER; note = 2'-O-methyl-adenosine
  modified_base 10: mod_base = OTHER; note = 2'-Fluoro-adenosine
  modified_base 11: mod_base = um
  modified_base 12: mod_base = um
  modified_base 13: mod_base = cm
  modified_base 14: mod_base = OTHER; note = 2'-Fluoro-uridine
  modified_base 15: mod_base = cm
  modified_base 16: mod_base = OTHER; note = 2'-O-methyl-adenosine
  modified_base 17: mod_base = cm
  modified_base 18: mod_base = OTHER; note = 2'-O-methyl-adenosine
  modified_base 19: mod_base = cm
  misc_feature 20..22: note = linked via phosphorothioate
  modified_base 20: mod_base = um
  modified_base 21: mod_base = gm
  modified_base 22: mod_base = gm
  source 1..22: mol_type = other RNA
tcagtcacaattctcacactgg

SEQ ID NO: 472 - RNA, 22 nt, synthetic construct
  misc_feature 1..4: note = linked via phosphorothioate
  modified_base 1: mod_base = OTHER; note = 4'-O-monomethylphosphonate-2'-O-methylmethyluridine
  modified_base 2: mod_base = OTHER; note = 2'-Fluoro-cytidine
  modified_base 3: mod_base = OTHER; note = 2'-Fluoro-adenosine
  modified_base 4: mod_base = OTHER; note = 2'-Fluoro-guanosine
  modified_base 5: mod_base = OTHER; note = 2'-Fluoro-uridine
  modified_base 6: mod_base = cm
  modified_base 7: mod_base = OTHER; note = 2'-Fluoro-adenosine
  modified_base 8: mod_base = cm
  modified_base 9: mod_base = OTHER; note = 2'-O-methyl-adenosine
  modified_base 10: mod_base = OTHER; note = 2'-Fluoro-adenosine
  modified_base 11: mod_base = um
  modified_base 12: mod_base = um
  modified_base 13: mod_base = cm
  modified_base 14: mod_base = OTHER; note = 2'-Fluoro-uridine
  modified_base 15: mod_base = cm
  modified_base 16: mod_base = OTHER; note = 2'-O-methyl-adenosine
  modified_base 17: mod_base = cm
  modified_base 18: mod_base = OTHER; note = 2'-O-methyl-adenosine
  modified_base 19: mod_base = cm
  misc_feature 20..22: note = linked via phosphorothioate
  modified_base 20: mod_base = um
  modified_base 21: mod_base = gm
  modified_base 22: mod_base = gm
  source 1..22: mol_type = other RNA
tcagtcacaattctcacactgg

SEQ ID NO: 473 - RNA, 22 nt, synthetic construct
  misc_feature 1..4: note = linked via phosphorothioate
  modified_base 1: mod_base = OTHER; note = 4'-O-monomethylphosphonate-2'-O-methylmethyluridine
  modified_base 2: mod_base = OTHER; note = 2'-Fluoro-cytidine
  modified_base 3: mod_base = OTHER; note = 2'-Fluoro-adenosine
  modified_base 4: mod_base = OTHER; note = 2'-Fluoro-guanosine
  modified_base 5: mod_base = OTHER; note = 2'-Fluoro-uridine
  modified_base 6: mod_base = cm
  modified_base 7: mod_base = OTHER; note = 2'-Fluoro-adenosine
  modified_base 8: mod_base = cm
  modified_base 9: mod_base = OTHER; note = 2'-O-methyl-adenosine
  modified_base 10: mod_base = OTHER; note = 2'-Fluoro-adenosine
  modified_base 11: mod_base = um
  modified_base 12: mod_base = um
  modified_base 13: mod_base = cm
  modified_base 14: mod_base = OTHER; note = 2'-Fluoro-uridine
  modified_base 15: mod_base = cm
  modified_base 16: mod_base = OTHER; note = 2'-O-methyl-adenosine
  modified_base 17: mod_base = cm
  modified_base 18: mod_base = OTHER; note = 2'-O-methyl-adenosine
  modified_base 19: mod_base = cm
  misc_feature 20..22: note = linked via phosphorothioate
  modified_base 20: mod_base = um
  modified_base 21: mod_base = gm
  modified_base 22: mod_base = gm
  source 1..22: mol_type = other RNA
tcagtcacaattctcacactgg

SEQ ID NO: 474 - RNA, 22 nt, synthetic construct
  misc_feature 1..4: note = linked via phosphorothioate
  modified_base 1: mod_base = OTHER; note = 4'-O-monomethylphosphonate-2'-O-methylmethyluridine
  modified_base 2: mod_base = OTHER; note = 2'-Fluoro-cytidine
  modified_base 3: mod_base = OTHER; note = 2'-Fluoro-adenosine
  modified_base 4: mod_base = OTHER; note = 2'-Fluoro-guanosine
  modified_base 5: mod_base = OTHER; note = 2'-Fluoro-uridine
  modified_base 6: mod_base = cm
  modified_base 7: mod_base = OTHER; note = 2'-Fluoro-adenosine
  modified_base 8: mod_base = cm
  modified_base 9: mod_base = OTHER; note = 2'-O-methyl-adenosine
  modified_base 10: mod_base = OTHER; note = 2'-Fluoro-adenosine
  modified_base 11: mod_base = um
  modified_base 12: mod_base = um
  modified_base 13: mod_base = cm
  modified_base 14: mod_base = OTHER; note = 2'-Fluoro-uridine
  modified_base 15: mod_base = cm
  modified_base 16: mod_base = OTHER; note = 2'-O-methyl-adenosine
  modified_base 17: mod_base = cm
  modified_base 18: mod_base = OTHER; note = 2'-O-methyl-adenosine
  modified_base 19: mod_base = cm
  misc_feature 20..22: note = linked via phosphorothioate
  modified_base 20: mod_base = um
  modified_base 21: mod_base = gm
  modified_base 22: mod_base = gm
  source 1..22: mol_type = other RNA
tcagtcacaattctcacactgg

SEQ ID NO: 475 - RNA, 22 nt, synthetic construct
  misc_feature 1..4: note = linked via phosphorothioate
  modified_base 1: mod_base = OTHER; note = 4'-O-monomethylphosphonate-2'-O-methylmethyluridine
  modified_base 2: mod_base = OTHER; note = 2'-Fluoro-cytidine
  modified_base 3: mod_base = OTHER; note = 2'-Fluoro-adenosine
  modified_base 4: mod_base = OTHER; note = 2'-Fluoro-guanosine
  modified_base 5: mod_base = OTHER; note = 2'-Fluoro-uridine
  modified_base 6: mod_base = cm
  modified_base 7: mod_base = OTHER; note = 2'-Fluoro-adenosine
  modified_base 8: mod_base = cm
  modified_base 9: mod_base = OTHER; note = 2'-O-methyl-adenosine
  modified_base 10: mod_base = OTHER; note = 2'-Fluoro-adenosine
  modified_base 11: mod_base = um
  modified_base 12: mod_base = um
  modified_base 13: mod_base = cm
  modified_base 14: mod_base = OTHER; note = 2'-Fluoro-uridine
  modified_base 15: mod_base = cm
  modified_base 16: mod_base = OTHER; note = 2'-O-methyl-adenosine
  modified_base 17: mod_base = cm
  modified_base 18: mod_base = OTHER; note = 2'-O-methyl-adenosine
  modified_base 19: mod_base = cm
  misc_feature 20..22: note = linked via phosphorothioate
  modified_base 20: mod_base = um
  modified_base 21: mod_base = gm
  modified_base 22: mod_base = gm
  source 1..22: mol_type = other RNA
tcagtcacaattctcacactgg

SEQ ID NO: 476 - RNA, 22 nt, synthetic construct
  misc_feature 1..4: note = linked via phosphorothioate
  modified_base 1: mod_base = OTHER; note = 4'-O-monomethylphosphonate-2'-O-methylmethyluridine
  modified_base 2: mod_base = OTHER; note = 2'-Fluoro-cytidine
  modified_base 3: mod_base = OTHER; note = 2'-Fluoro-adenosine
  modified_base 4: mod_base = OTHER; note = 2'-Fluoro-guanosine
  modified_base 5: mod_base = OTHER; note = 2'-Fluoro-uridine
  modified_base 6: mod_base = cm
  modified_base 7: mod_base = OTHER; note = 2'-Fluoro-adenosine
  modified_base 8: mod_base = cm
  modified_base 9: mod_base = OTHER; note = 2'-O-methyl-adenosine
  modified_base 10: mod_base = OTHER; note = 2'-Fluoro-adenosine
  modified_base 11: mod_base = um
  modified_base 12: mod_base = um
  modified_base 13: mod_base = cm
  modified_base 14: mod_base = OTHER; note = 2'-Fluoro-uridine
  modified_base 15: mod_base = cm
  modified_base 16: mod_base = OTHER; note = 2'-O-methyl-adenosine
  modified_base 17: mod_base = cm
  modified_base 18: mod_base = OTHER; note = 2'-O-methyl-adenosine
  modified_base 19: mod_base = cm
  misc_feature 20..22: note = linked via phosphorothioate
  modified_base 20: mod_base = um
  modified_base 21: mod_base = gm
  modified_base 22: mod_base = gm
  source 1..22: mol_type = other RNA
tcagtcacaattctcacactgg

SEQ ID NO: 477 - RNA, 22 nt, synthetic construct
  misc_feature 1..4: note = linked via phosphorothioate
  modified_base 1: mod_base = OTHER; note = 4'-O-monomethylphosphonate-2'-O-methylmethyluridine
  modified_base 2: mod_base = OTHER; note = 2'-Fluoro-cytidine
  modified_base 3: mod_base = OTHER; note = 2'-Fluoro-adenosine
  modified_base 4: mod_base = OTHER; note = 2'-Fluoro-guanosine
  modified_base 5: mod_base = OTHER; note = 2'-Fluoro-uridine
  modified_base 6: mod_base = cm
  modified_base 7: mod_base = OTHER; note = 2'-Fluoro-adenosine
  modified_base 8: mod_base = cm
  modified_base 9: mod_base = OTHER; note = 2'-O-methyl-adenosine
  modified_base 10: mod_base = OTHER; note = 2'-Fluoro-adenosine
  modified_base 11: mod_base = um
  modified_base 12: mod_base = um
  modified_base 13: mod_base = cm
  modified_base 14: mod_base = OTHER; note = 2'-Fluoro-uridine
  modified_base 15: mod_base = cm
  modified_base 16: mod_base = OTHER; note = 2'-O-methyl-adenosine
  modified_base 17: mod_base = cm
  modified_base 18: mod_base = OTHER; note = 2'-O-methyl-adenosine
  modified_base 19: mod_base = cm
  misc_feature 20..22: note = linked via phosphorothioate
  modified_base 20: mod_base = um
  modified_base 21: mod_base = gm
  modified_base 22: mod_base = gm
  source 1..22: mol_type = other RNA
tcagtcacaattctcacactgg

SEQ ID NO: 478 - RNA, 22 nt, synthetic construct
  misc_feature 1..4: note = linked via phosphorothioate
  modified_base 1: mod_base = OTHER; note = 4'-O-monomethylphosphonate-2'-O-methylmethyluridine
  modified_base 2: mod_base = OTHER; note = 2'-Fluoro-cytidine
  modified_base 3: mod_base = OTHER; note = 2'-Fluoro-adenosine
  modified_base 4: mod_base = OTHER; note = 2'-Fluoro-guanosine
  modified_base 5: mod_base = OTHER; note = 2'-Fluoro-uridine
  modified_base 6: mod_base = cm
  modified_base 7: mod_base = OTHER; note = 2'-Fluoro-adenosine
  modified_base 8: mod_base = cm
  modified_base 9: mod_base = OTHER; note = 2'-O-methyl-adenosine
  modified_base 10: mod_base = OTHER; note = 2'-Fluoro-adenosine
  modified_base 11: mod_base = um
  modified_base 12: mod_base = um
  modified_base 13: mod_base = cm
  modified_base 14: mod_base = OTHER; note = 2'-Fluoro-uridine
  modified_base 15: mod_base = cm
  modified_base 16: mod_base = OTHER; note = 2'-O-methyl-adenosine
  modified_base 17: mod_base = cm
  modified_base 18: mod_base = OTHER; note = 2'-O-methyl-adenosine
  modified_base 19: mod_base = cm
  misc_feature 20..22: note = linked via phosphorothioate
  modified_base 20: mod_base = um
  modified_base 21: mod_base = gm
  modified_base 22: mod_base = gm
  source 1..22: mol_type = other RNA
tcagtcacaattctcacactgg

SEQ ID NO: 479 - RNA, 22 nt, synthetic construct
  misc_feature 1..4: note = linked via phosphorothioate
  modified_base 1: mod_base = OTHER; note = 4'-O-monomethylphosphonate-2'-O-methylmethyluridine
  modified_base 2: mod_base = OTHER; note = 2'-Fluoro-cytidine
  modified_base 3: mod_base = OTHER; note = 2'-Fluoro-adenosine
  modified_base 4: mod_base = OTHER; note = 2'-Fluoro-guanosine
  modified_base 5: mod_base = OTHER; note = 2'-Fluoro-uridine
  modified_base 6: mod_base = cm
  modified_base 7: mod_base = OTHER; note = 2'-Fluoro-adenosine
  modified_base 8: mod_base = cm
  modified_base 9: mod_base = OTHER; note = 2'-O-methyl-adenosine
  modified_base 10: mod_base = OTHER; note = 2'-Fluoro-adenosine
  modified_base 11: mod_base = um
  modified_base 12: mod_base = um
  modified_base 13: mod_base = cm
  modified_base 14: mod_base = OTHER; note = 2'-Fluoro-uridine
  modified_base 15: mod_base = cm
  modified_base 16: mod_base = OTHER; note = 2'-O-methyl-adenosine
  modified_base 17: mod_base = cm
  modified_base 18: mod_base = OTHER; note = 2'-O-methyl-adenosine
  modified_base 19: mod_base = cm
  misc_feature 20..22: note = linked via phosphorothioate
  modified_base 20: mod_base = um
  modified_base 21: mod_base = gm
  modified_base 22: mod_base = gm
  source 1..22: mol_type = other RNA
tcagtcacaattctcacactgg

SEQ ID NO: 480 - RNA, 22 nt, synthetic construct
  misc_feature 1..4: note = linked via phosphorothioate
  modified_base 1: mod_base = OTHER; note = 4'-O-monomethylphosphonate-2'-O-methylmethyluridine
  modified_base 2: mod_base = OTHER; note = 2'-Fluoro-cytidine
  modified_base 3: mod_base = OTHER; note = 2'-Fluoro-adenosine
  modified_base 4: mod_base = OTHER; note = 2'-Fluoro-guanosine
  modified_base 5: mod_base = OTHER; note = 2'-Fluoro-uridine
  modified_base 6: mod_base = cm
  modified_base 7: mod_base = OTHER; note = 2'-Fluoro-adenosine
  modified_base 8: mod_base = cm
  modified_base 9: mod_base = OTHER; note = 2'-O-methyl-adenosine
  modified_base 10: mod_base = OTHER; note = 2'-Fluoro-adenosine
  modified_base 11: mod_base = um
  modified_base 12: mod_base = um
  modified_base 13: mod_base = cm
  modified_base 14: mod_base = OTHER; note = 2'-Fluoro-uridine
  modified_base 15: mod_base = cm
  modified_base 16: mod_base = OTHER; note = 2'-O-methyl-adenosine
  modified_base 17: mod_base = cm
  modified_base 18: mod_base = OTHER; note = 2'-O-methyl-adenosine
  modified_base 19: mod_base = cm
  misc_feature 20..22: note = linked via phosphorothioate
  modified_base 20: mod_base = um
  modified_base 21: mod_base = gm
  modified_base 22: mod_base = gm
  source 1..22: mol_type = other RNA
tcagtcacaattctcacactgg

SEQ ID NO: 481 - RNA, 22 nt, synthetic construct
  misc_feature 1..5: note = linked via phosphorothioate
  modified_base 1: mod_base = OTHER; note = 4'-O-monomethylphosphonate-2'-O-methylmethyluridine
  modified_base 2: mod_base = OTHER; note = 2'-Fluoro-cytidine
  modified_base 3: mod_base = OTHER; note = 2'-Fluoro-adenosine
  modified_base 4: mod_base = OTHER; note = 2'-Fluoro-guanosine
  modified_base 5: mod_base = OTHER; note = 2'-Fluoro-uridine
  modified_base 6: mod_base = cm
  modified_base 7: mod_base = OTHER; note = 2'-Fluoro-adenosine
  modified_base 8: mod_base = cm
  modified_base 9: mod_base = OTHER; note = 2'-O-methyl-adenosine
  modified_base 10: mod_base = OTHER; note = 2'-Fluoro-adenosine
  modified_base 11: mod_base = um
  modified_base 12: mod_base = um
  modified_base 13: mod_base = cm
  modified_base 14: mod_base = OTHER; note = 2'-Fluoro-uridine
  modified_base 15: mod_base = cm
  modified_base 16: mod_base = OTHER; note = 2'-O-methyl-adenosine
  modified_base 17: mod_base = cm
  modified_base 18: mod_base = OTHER; note = 2'-O-methyl-adenosine
  modified_base 19: mod_base = cm
  misc_feature 20..22: note = linked via phosphorothioate
  modified_base 20: mod_base = um
  modified_base 21: mod_base = gm
  modified_base 22: mod_base = gm
  source 1..22: mol_type = other RNA
tcagtcacaattctcacactgg

SEQ ID NO: 482 - RNA, 20 nt, synthetic construct
  source 1..20: mol_type = other RNA
agttgacttatttagtgata

SEQ ID NO: 483 - RNA, 15 nt, synthetic construct
  source 1..15: mol_type = other RNA
acttatttagtgata

SEQ ID NO: 484 - RNA, 18 nt, synthetic construct
  source 1..18: mol_type = other RNA
agttgacttatttagtga

SEQ ID NO: 485 - RNA, 13 nt, synthetic construct
  source 1..13: mol_type = other RNA
acttatttagtga

SEQ ID NO: 486 - RNA, 18 nt, synthetic construct
  source 1..18: mol_type = other RNA
agttgacttatttagtga

SEQ ID NO: 487 - RNA, 18 nt, synthetic construct
  source 1..18: mol_type = other RNA
agttgacttatttagtga

SEQ ID NO: 488 - RNA, 15 nt, synthetic construct
  source 1..15: mol_type = other RNA
acttatttagtgata

SEQ ID NO: 489 - RNA, 28 nt, synthetic construct
  source 1..28: mol_type = other RNA
gctacggcccagttgacttatttagtga

SEQ ID NO: 490 - RNA, 28 nt, synthetic construct
  source 1..28: mol_type = other RNA
gctacggcccagttgacttatttagtga

SEQ ID NO: 491 - DNA, 20 bp, synthetic construct
  misc_feature 1..15: note = RNA fragment
  misc_feature 16: note = DNA fragment
  misc_feature 17..20: note = RNA fragment
  source 1..20: mol_type = other DNA
agttgacttatttagtgata

SEQ ID NO: 492 - DNA, 15 bp, synthetic construct
  misc_feature 1..10: note = RNA fragment
  misc_feature 11: note = DNA fragment
  misc_feature 12..15: note = RNA fragment
  source 1..15: mol_type = other DNA
acttatttagtgata

SEQ ID NO: 493 - RNA, 22 nt, synthetic construct
  source 1..22: mol_type = other RNA
tatcactaaataagtcaactgg

SEQ ID NO: 494 - RNA, 22 nt, synthetic construct
  source 1..22: mol_type = other RNA
tatcactaaataagtcaactgg

SEQ ID NO: 495 - RNA, 22 nt, synthetic construct
  source 1..22: mol_type = other RNA
tatcactaaataagtcaactgg

SEQ ID NO: 496 - RNA, 22 nt, synthetic construct
  source 1..22: mol_type = other RNA
tatcactaaataagtcaactgg

SEQ ID NO: 497 - RNA, 22 nt, synthetic construct
  source 1..22: mol_type = other RNA
tatcactaaataagtcaactgg

SEQ ID NO: 498 - RNA, 22 nt, synthetic construct
  source 1..22: mol_type = other RNA
tatcactaaataagtcaactgg

SEQ ID NO: 499 - RNA, 22 nt, synthetic construct
  source 1..22: mol_type = other RNA
tatcactaaataagtcaactgg

SEQ ID NO: 500 - RNA, 22 nt, synthetic construct
  source 1..22: mol_type = other RNA
tatcactaaataagtcaactgg

SEQ ID NO: 501 - RNA, 22 nt, synthetic construct
  source 1..22: mol_type = other RNA
tatcactaaataagtcaactgg

SEQ ID NO: 502 - RNA, 22 nt, synthetic construct
  source 1..22: mol_type = other RNA
tatcactaaataagtcaactgg

SEQ ID NO: 503 - RNA, 22 nt, synthetic construct
  source 1..22: mol_type = other RNA
tatcactaaataagtcaactgg

SEQ ID NO: 504 - RNA, 20 nt, synthetic construct
  misc_feature 1^2: note = linked via phosphorothioate
  modified_base 1: mod_base = OTHER; note = hexadecanamidodiethoxymethanol-adenosine
  modified_base 2: mod_base = gm
  modified_base 3: mod_base = um
  modified_base 4: mod_base = um
  modified_base 5: mod_base = gm
  modified_base 6: mod_base = OTHER; note = 2'-O-methyl-adenosine
  modified_base 7: mod_base = cm
  modified_base 8: mod_base = OTHER; note = 2'-Fluoro-uridine
  modified_base 9: mod_base = OTHER; note = 2'-Fluoro-uridine
  modified_base 10: mod_base = OTHER; note = 2'-Fluoro-adenosine
  modified_base 11: mod_base = OTHER; note = 2'-Fluoro-uridine
  modified_base 12: mod_base = um
  modified_base 13: mod_base = um
  modified_base 14: mod_base = OTHER; note = 2'-O-methyl-adenosine
  modified_base 15: mod_base = gm
  modified_base 16: mod_base = um
  modified_base 17: mod_base = gm
  misc_feature 18..20: note = linked via phosphorothioate
  modified_base 18: mod_base = OTHER; note = 2'-O-methyl-adenosine
  modified_base 19: mod_base = um
  modified_base 20: mod_base = OTHER; note = 2'-O-methyl-adenosine
  source 1..20: mol_type = other RNA
agttgacttatttagtgata

SEQ ID NO: 505 - RNA, 15 nt, synthetic construct
  misc_feature 1^2: note = linked via phosphorothioate
  modified_base 1: mod_base = OTHER; note = hexadecanamidodiethoxymethanol-adenosine
  modified_base 2: mod_base = cm
  modified_base 3: mod_base = OTHER; note = 2'-Fluoro-uridine
  modified_base 4: mod_base = OTHER; note = 2'-Fluoro-uridine
  modified_base 5: mod_base = OTHER; note = 2'-Fluoro-adenosine
  modified_base 6: mod_base = OTHER; note = 2'-Fluoro-uridine
  modified_base 7: mod_base = um
  modified_base 8: mod_base = um
  modified_base 9: mod_base = OTHER; note = 2'-O-methyl-adenosine
  modified_base 10: mod_base = gm
  modified_base 11: mod_base = um
  modified_base 12: mod_base = gm
  misc_feature 13..15: note = linked via phosphorothioate
  modified_base 13: mod_base = OTHER; note = 2'-O-methyl-adenosine
  modified_base 14: mod_base = um
  modified_base 15: mod_base = OTHER; note = 2'-O-methyl-adenosine
  source 1..15: mol_type = other RNA
acttatttagtgata

SEQ ID NO: 506 - RNA, 18 nt, synthetic construct
  misc_feature 1^2: note = linked via phosphorothioate
  modified_base 1: mod_base = OTHER; note = hexadecanamidodiethoxymethanol-adenosine
  modified_base 2: mod_base = gm
  modified_base 3: mod_base = um
  modified_base 4: mod_base = um
  modified_base 5: mod_base = gm
  modified_base 6: mod_base = OTHER; note = 2'-O-methyl-adenosine
  modified_base 7: mod_base = cm
  modified_base 8: mod_base = OTHER; note = 2'-Fluoro-uridine
  modified_base 9: mod_base = OTHER; note = 2'-Fluoro-uridine
  modified_base 10: mod_base = OTHER; note = 2'-Fluoro-adenosine
  modified_base 11: mod_base = OTHER; note = 2'-Fluoro-uridine
  modified_base 12: mod_base = um
  modified_base 13: mod_base = um
  modified_base 14: mod_base = OTHER; note = 2'-O-methyl-adenosine
  modified_base 15: mod_base = gm
  misc_feature 16..18: note = linked via phosphorothioate
  modified_base 16: mod_base = um
  modified_base 17: mod_base = gm
  modified_base 18: mod_base = OTHER; note = 2'-O-methyl-adenosine
  source 1..18: mol_type = other RNA
agttgacttatttagtga

SEQ ID NO: 507 - RNA, 13 nt, synthetic construct
  misc_feature 1^2: note = linked via phosphorothioate
  modified_base 1: mod_base = OTHER; note = hexadecanamidodiethoxymethanol-adenosine
  modified_base 2: mod_base = cm
  modified_base 3: mod_base = OTHER; note = 2'-Fluoro-uridine
  modified_base 4: mod_base = OTHER; note = 2'-Fluoro-uridine
  modified_base 5: mod_base = OTHER; note = 2'-Fluoro-adenosine
  modified_base 6: mod_base = OTHER; note = 2'-Fluoro-uridine
  modified_base 7: mod_base = um
  modified_base 8: mod_base = um
  modified_base 9: mod_base = OTHER; note = 2'-O-methyl-adenosine
  modified_base 10: mod_base = gm
  misc_feature 11..13: note = linked via phosphorothioate
  modified_base 11: mod_base = um
  modified_base 12: mod_base = gm
  modified_base 13: mod_base = OTHER; note = 2'-O-methyl-adenosine
  source 1..13: mol_type = other RNA
acttatttagtga

SEQ ID NO: 508 - RNA, 18 nt, synthetic construct
  misc_feature 1^2: note = linked via phosphorothioate
  modified_base 1: mod_base = OTHER; note = octadecanamidodiethoxymethanol-adenosine
  modified_base 2: mod_base = gm
  modified_base 3: mod_base = um
  modified_base 4: mod_base = um
  modified_base 5: mod_base = gm
  modified_base 6: mod_base = OTHER; note = 2'-O-methyl-adenosine
  modified_base 7: mod_base = cm
  modified_base 8: mod_base = OTHER; note = 2'-Fluoro-uridine
  modified_base 9: mod_base = OTHER; note = 2'-Fluoro-uridine
  modified_base 10: mod_base = OTHER; note = 2'-Fluoro-adenosine
  modified_base 11: mod_base = OTHER; note = 2'-Fluoro-uridine
  modified_base 12: mod_base = um
  modified_base 13: mod_base = um
  modified_base 14: mod_base = OTHER; note = 2'-O-methyl-adenosine
  modified_base 15: mod_base = gm
  misc_feature 16..18: note = linked via phosphorothioate
  modified_base 16: mod_base = um
  modified_base 17: mod_base = gm
  modified_base 18: mod_base = OTHER; note = 2'-O-methyl-adenosine
  source 1..18: mol_type = other RNA
agttgacttatttagtga

SEQ ID NO: 509 - RNA, 18 nt, synthetic construct
  misc_feature 1^2: note = linked via phosphorothioate
  modified_base 1: mod_base = OTHER; note = docosanamidodiethoxymethanol-adenosine
  modified_base 2: mod_base = gm
  modified_base 3: mod_base = um
  modified_base 4: mod_base = um
  modified_base 5: mod_base = gm
  modified_base 6: mod_base = OTHER; note = 2'-O-methyl-adenosine
  modified_base 7: mod_base = cm
  modified_base 8: mod_base = OTHER; note = 2'-Fluoro-uridine
  modified_base 9: mod_base = OTHER; note = 2'-Fluoro-uridine
  modified_base 10: mod_base = OTHER; note = 2'-Fluoro-adenosine
  modified_base 11: mod_base = OTHER; note = 2'-Fluoro-uridine
  modified_base 12: mod_base = um
  modified_base 13: mod_base = um
  modified_base 14: mod_base = OTHER; note = 2'-O-methyl-adenosine
  modified_base 15: mod_base = gm
  misc_feature 16..18: note = linked via phosphorothioate
  modified_base 16: mod_base = um
  modified_base 17: mod_base = gm
  modified_base 18: mod_base = OTHER; note = 2'-O-methyl-adenosine
  source 1..18: mol_type = other RNA
agttgacttatttagtga

SEQ ID NO: 510 - RNA, 15 nt, synthetic construct
  misc_feature 1^2: note = linked via phosphorothioate
  modified_base 1: mod_base = OTHER; note = hexadecanamidodiethoxymethanol-adenosine
  modified_base 2: mod_base = cm
  modified_base 3: mod_base = OTHER; note = 2'-Fluoro-uridine
  modified_base 4: mod_base = OTHER; note = 2'-Fluoro-uridine
  modified_base 5: mod_base = OTHER; note = 2'-Fluoro-adenosine
  modified_base 6: mod_base = OTHER; note = 2'-Fluoro-uridine
  modified_base 7: mod_base = um
  modified_base 8: mod_base = um
  modified_base 9: mod_base = OTHER; note = 2'-O-methyl-adenosine
  modified_base 10: mod_base = gm
  modified_base 11: mod_base = um
  modified_base 12: mod_base = gm
  misc_feature 13..15: note = linked via phosphorothioate
  modified_base 13: mod_base = OTHER; note = 2'-O-methyl-adenosine
  modified_base 14: mod_base = um
  modified_base 15: mod_base = OTHER; note = 2'-O-methyl-adenosine
  source 1..15: mol_type = other RNA
acttatttagtgata

SEQ ID NO: 511 - RNA, 28 nt, synthetic construct
  modified_base 1: mod_base = OTHER; note = 2'-O,4'-C-Methyleneguanosine
  misc_feature 2..8: note = linked via phosphorothioate
  modified_base 2: mod_base = cm
  modified_base 3: mod_base = um
  modified_base 4: mod_base = OTHER; note = hexadecanamidodiethoxymethanol-adenosine
  modified_base 5: mod_base = cm
  modified_base 6: mod_base = gm
  modified_base 7: mod_base = gm
  modified_base 8: mod_base = OTHER; note = 2'-O,4'-C-Methylenecytidine
  modified_base 9: mod_base = cm
  modified_base 10: mod_base = cm
  modified_base 11: mod_base = OTHER; note = 2'-O-methyl-adenosine
  modified_base 12: mod_base = gm
  modified_base 13: mod_base = um
  modified_base 14: mod_base = um
  modified_base 15: mod_base = gm
  modified_base 16: mod_base = OTHER; note = 2'-O-methyl-adenosine
  modified_base 17: mod_base = cm
  modified_base 18: mod_base = OTHER; note = 2'-Fluoro-uridine
  modified_base 19: mod_base = OTHER; note = 2'-Fluoro-uridine
  modified_base 20: mod_base = OTHER; note = 2'-Fluoro-adenosine
  modified_base 21: mod_base = OTHER; note = 2'-Fluoro-uridine
  modified_base 22: mod_base = um
  modified_base 23: mod_base = um
  modified_base 24: mod_base = OTHER; note = 2'-O-methyl-adenosine
  modified_base 25: mod_base = gm
  misc_feature 26..28: note = linked via phosphorothioate
  modified_base 26: mod_base = um
  modified_base 27: mod_base = gm
  modified_base 28: mod_base = OTHER; note = 2'-O-methyl-adenosine
  source 1..28: mol_type = other RNA
gctacggcccagttgacttatttagtga

SEQ ID NO: 512 - RNA, 28 nt, synthetic construct
  modified_base 1: mod_base = OTHER; note = 2'-O,4'-C-Methyleneguanosine
  misc_feature 2..8: note = linked via phosphorothioate
  modified_base 2: mod_base = cm
  modified_base 3: mod_base = um
  modified_base 4: mod_base = OTHER; note = 2'-O-methyl-adenosine
  modified_base 5: mod_base = cm
  modified_base 6: mod_base = gm
  modified_base 7: mod_base = gm
  modified_base 8: mod_base = OTHER; note = 2'-O,4'-C-Methylenecytidine
  modified_base 9: mod_base = cm
  modified_base 10: mod_base = cm
  modified_base 11: mod_base = OTHER; note = 2'-O-methyl-adenosine
  modified_base 12: mod_base = gm
  modified_base 13: mod_base = um
  modified_base 14: mod_base = um
  modified_base 15: mod_base = gm
  modified_base 16: mod_base = OTHER; note = 2'-O-methyl-adenosine
  modified_base 17: mod_base = cm
  modified_base 18: mod_base = OTHER; note = 2'-Fluoro-uridine
  modified_base 19: mod_base = OTHER; note = 2'-Fluoro-uridine
  modified_base 20: mod_base = OTHER; note = 2'-Fluoro-adenosine
  modified_base 21: mod_base = OTHER; note = 2'-Fluoro-uridine
  modified_base 22: mod_base = um
  modified_base 23: mod_base = um
  modified_base 24: mod_base = OTHER; note = 2'-O-methyl-adenosine
  modified_base 25: mod_base = gm
  misc_feature 26..28: note = linked via phosphorothioate
  modified_base 26: mod_base = um
  modified_base 27: mod_base = gm
  modified_base 28: mod_base = OTHER; note = 2'-O-methyl-adenosine
  source 1..28: mol_type = other RNA
gctacggcccagttgacttatttagtga

SEQ ID NO: 513 - DNA, 20 bp, synthetic construct
  misc_feature 1..15: note = RNA fragment
  misc_feature 16: note = DNA fragment
  misc_feature 17..20: note = RNA fragment
  misc_feature 1^2: note = linked via phosphorothioate
  modified_base 1: mod_base = OTHER; note = hexadecanamidodiethoxymethanol-adenosine
  modified_base 2: mod_base = OTHER; note = 2'-O,4'-C-Methyleneguanosine
  modified_base 3: mod_base = um
  modified_base 4: mod_base = um
  modified_base 5: mod_base = gm
  modified_base 6: mod_base = OTHER; note = 2'-O-methyl-adenosine
  modified_base 7: mod_base = cm
  modified_base 8: mod_base = OTHER; note = 2'-Fluoro-uridine
  modified_base 9: mod_base = OTHER; note = 2'-Fluoro-uridine
  modified_base 10: mod_base = OTHER; note = 2'-Fluoro-adenosine
  modified_base 11: mod_base = OTHER; note = 2'-Fluoro-uridine
  modified_base 12: mod_base = um
  modified_base 13: mod_base = um
  modified_base 14: mod_base = OTHER; note = 2'-O-methyl-adenosine
  modified_base 15: mod_base = OTHER; note = 2'-O,4'-C-Methyleneguanosine
  modified_base 16: mod_base = OTHER; note = 2'-O,4'-C-Methylenethymine
  modified_base 17: mod_base = gm
  misc_feature 18..20: note = linked via phosphorothioate
  modified_base 18: mod_base = OTHER; note = 2'-O-methyl-adenosine
  modified_base 19: mod_base = um
  modified_base 20: mod_base = OTHER; note = 2'-O-methyl-adenosine
  source 1..20: mol_type = other DNA
agttgacttatttagtgata

SEQ ID NO: 514 - DNA, 15 bp, synthetic construct
  misc_feature 1..10: note = RNA fragment
  misc_feature 11: note = DNA fragment
  misc_feature 12..15: note = RNA fragment
  misc_feature 1^2: note = linked via phosphorothioate
  modified_base 1: mod_base = OTHER; note = hexadecanamidodiethoxymethanol-adenosine
  modified_base 2: mod_base = OTHER; note = 2'-O,4'-C-Methylenecytidine
  modified_base 3: mod_base = OTHER; note = 2'-Fluoro-uridine
  modified_base 4: mod_base = OTHER; note = 2'-Fluoro-uridine
  modified_base 5: mod_base = OTHER; note = 2'-Fluoro-adenosine
  modified_base 6: mod_base = OTHER; note = 2'-Fluoro-uridine
  modified_base 7: mod_base = um
  modified_base 8: mod_base = um
  modified_base 9: mod_base = OTHER; note = 2'-O-methyl-adenosine
  modified_base 10: mod_base = OTHER; note = 2'-O,4'-C-Methyleneguanosine
  modified_base 11: mod_base = OTHER; note = 2'-O,4'-C-Methylenethymine
  modified_base 12: mod_base = gm
  misc_feature 13..15: note = linked via phosphorothioate
  modified_base 13: mod_base = OTHER; note = 2'-O-methyl-adenosine
  modified_base 14: mod_base = um
  modified_base 15: mod_base = OTHER; note = 2'-O-methyl-adenosine
  source 1..15: mol_type = other DNA
acttatttagtgata

SEQ ID NO: 515 - RNA, 22 nt, synthetic construct
  misc_feature 1..4: note = linked via phosphorothioate
  modified_base 1: mod_base = OTHER; note = 4'-O-monomethylphosphonate-2'-O-methylmethyluridine
  modified_base 2: mod_base = OTHER; note = 2'-Fluoro-adenosine
  modified_base 3: mod_base = OTHER; note = 2'-Fluoro-uridine
  modified_base 4: mod_base = OTHER; note = 2'-Fluoro-cytidine
  modified_base 5: mod_base = OTHER; note = 2'-Fluoro-adenosine
  modified_base 6: mod_base = cm
  modified_base 7: mod_base = OTHER; note = 2'-Fluoro-uridine
  modified_base 8: mod_base = OTHER; note = 2'-O-methyl-adenosine
  modified_base 9: mod_base = OTHER; note = 2'-O-methyl-adenosine
  modified_base 10: mod_base = OTHER; note = 2'-Fluoro-adenosine
  modified_base 11: mod_base = um
  modified_base 12: mod_base = OTHER; note = 2'-O-methyl-adenosine
  modified_base 13: mod_base = OTHER; note = 2'-O-methyl-adenosine
  modified_base 14: mod_base = OTHER; note = 2'-Fluoro-guanosine
  modified_base 15: mod_base = um
  modified_base 16: mod_base = cm
  modified_base 17: mod_base = OTHER; note = 2'-O-methyl-adenosine
  modified_base 18: mod_base = OTHER; note = 2'-O-methyl-adenosine
  modified_base 19: mod_base = cm
  misc_feature 20..22: note = linked via phosphorothioate
  modified_base 20: mod_base = um
  modified_base 21: mod_base = gm
  modified_base 22: mod_base = gm
  source 1..22: mol_type = other RNA
tatcactaaataagtcaactgg

SEQ ID NO: 516 - RNA, 22 nt, synthetic construct
  misc_feature 1..4: note = linked via phosphorothioate
  modified_base 1: mod_base = OTHER; note = 4'-O-monomethylphosphonate-2'-O-methylmethyluridine
  modified_base 2: mod_base = OTHER; note = 2'-Fluoro-adenosine
  modified_base 3: mod_base = OTHER; note = 2'-Fluoro-uridine
  modified_base 4: mod_base = OTHER; note = 2'-Fluoro-cytidine
  modified_base 5: mod_base = OTHER; note = 2'-Fluoro-adenosine
  modified_base 6: mod_base = cm
  modified_base 7: mod_base = OTHER; note = 2'-Fluoro-uridine
  modified_base 8: mod_base = OTHER; note = 2'-O-methyl-adenosine
  modified_base 9: mod_base = OTHER; note = 2'-O-methyl-adenosine
  modified_base 10: mod_base = OTHER; note = 2'-Fluoro-adenosine
  modified_base 11: mod_base = um
  modified_base 12: mod_base = OTHER; note = 2'-O-methyl-adenosine
  modified_base 13: mod_base = OTHER; note = 2'-O-methyl-adenosine
  modified_base 14: mod_base = OTHER; note = 2'-Fluoro-guanosine
  modified_base 15: mod_base = um
  modified_base 16: mod_base = cm
  modified_base 17: mod_base = OTHER; note = 2'-O-methyl-adenosine
  modified_base 18: mod_base = OTHER; note = 2'-O-methyl-adenosine
  modified_base 19: mod_base = cm
  misc_feature 20..22: note = linked via phosphorothioate
  modified_base 20: mod_base = um
  modified_base 21: mod_base = gm
  modified_base 22: mod_base = gm
  source 1..22: mol_type = other RNA
tatcactaaataagtcaactgg

SEQ ID NO: 517 - RNA, 22 nt, synthetic construct
  misc_feature 1..4: note = linked via phosphorothioate
  modified_base 1: mod_base = OTHER; note = 4'-O-monomethylphosphonate-2'-O-methylmethyluridine
  modified_base 2: mod_base = OTHER; note = 2'-Fluoro-adenosine
  modified_base 3: mod_base = OTHER; note = 2'-Fluoro-uridine
  modified_base 4: mod_base = OTHER; note = 2'-Fluoro-cytidine
  modified_base 5: mod_base = OTHER; note = 2'-Fluoro-adenosine
  modified_base 6: mod_base = cm
  modified_base 7: mod_base = OTHER; note = 2'-Fluoro-uridine
  modified_base 8: mod_base = OTHER; note = 2'-O-methyl-adenosine
  modified_base 9: mod_base = OTHER; note = 2'-O-methyl-adenosine
  modified_base 10: mod_base = OTHER; note = 2'-Fluoro-adenosine
  modified_base 11: mod_base = um
  modified_base 12: mod_base = OTHER; note = 2'-O-methyl-adenosine
  modified_base 13: mod_base = OTHER; note = 2'-O-methyl-adenosine
  modified_base 14: mod_base = OTHER; note = 2'-Fluoro-guanosine
  modified_base 15: mod_base = um
  modified_base 16: mod_base = cm
  modified_base 17: mod_base = OTHER; note = 2'-O-methyl-adenosine
  modified_base 18: mod_base = OTHER; note = 2'-O-methyl-adenosine
  modified_base 19: mod_base = cm
  misc_feature 20..22: note = linked via phosphorothioate
  modified_base 20: mod_base = um
  modified_base 21: mod_base = gm
  modified_base 22: mod_base = gm
  source 1..22: mol_type = other RNA
tatcactaaataagtcaactgg

SEQ ID NO: 518 - RNA, 22 nt, synthetic construct
  misc_feature 1..4: note = linked via phosphorothioate
  modified_base 1: mod_base = OTHER; note = 4'-O-monomethylphosphonate-2'-O-methylmethyluridine
  modified_base 2: mod_base = OTHER; note = 2'-Fluoro-adenosine
  modified_base 3: mod_base = OTHER; note = 2'-Fluoro-uridine
  modified_base 4: mod_base = OTHER; note = 2'-Fluoro-cytidine
  modified_base 5: mod_base = OTHER; note = 2'-Fluoro-adenosine
  modified_base 6: mod_base = cm
  modified_base 7: mod_base = OTHER; note = 2'-Fluoro-uridine
  modified_base 8: mod_base = OTHER; note = 2'-O-methyl-adenosine
  modified_base 9: mod_base = OTHER; note = 2'-O-methyl-adenosine
  modified_base 10: mod_base = OTHER; note = 2'-Fluoro-adenosine
  modified_base 11: mod_base = um
  modified_base 12: mod_base = OTHER; note = 2'-O-methyl-adenosine
  modified_base 13: mod_base = OTHER; note = 2'-O-methyl-adenosine
  modified_base 14: mod_base = OTHER; note = 2'-Fluoro-guanosine
  modified_base 15: mod_base = um
  modified_base 16: mod_base = cm
  modified_base 17: mod_base = OTHER; note = 2'-O-methyl-adenosine
  modified_base 18: mod_base = OTHER; note = 2'-O-methyl-adenosine
  modified_base 19: mod_base = cm
  misc_feature 20..22: note = linked via phosphorothioate
  modified_base 20: mod_base = um
  modified_base 21: mod_base = gm
  modified_base 22: mod_base = gm
  source 1..22: mol_type = other RNA
tatcactaaataagtcaactgg

SEQ ID NO: 519 - RNA, 22 nt, synthetic construct
  misc_feature 1..4: note = linked via phosphorothioate
  modified_base 1: mod_base = OTHER; note = 4'-O-monomethylphosphonate-2'-O-methylmethyluridine
  modified_base 2: mod_base = OTHER; note = 2'-Fluoro-adenosine
  modified_base 3: mod_base = OTHER; note = 2'-Fluoro-uridine
  modified_base 4: mod_base = OTHER; note = 2'-Fluoro-cytidine
  modified_base 5: mod_base = OTHER; note = 2'-Fluoro-adenosine
  modified_base 6: mod_base = cm
  modified_base 7: mod_base = OTHER; note = 2'-Fluoro-uridine
  modified_base 8: mod_base = OTHER; note = 2'-O-methyl-adenosine
  modified_base 9: mod_base = OTHER; note = 2'-O-methyl-adenosine
  modified_base 10: mod_base = OTHER; note = 2'-Fluoro-adenosine
  modified_base 11: mod_base = um
  modified_base 12: mod_base = OTHER; note = 2'-O-methyl-adenosine
  modified_base 13: mod_base = OTHER; note = 2'-O-methyl-adenosine
  modified_base 14: mod_base = OTHER; note = 2'-Fluoro-guanosine
  modified_base 15: mod_base = um
  modified_base 16: mod_base = cm
  modified_base 17: mod_base = OTHER; note = 2'-O-methyl-adenosine
  modified_base 18: mod_base = OTHER; note = 2'-O-methyl-adenosine
  modified_base 19: mod_base = cm
  misc_feature 20..22: note = linked via phosphorothioate
  modified_base 20: mod_base = um
  modified_base 21: mod_base = gm
  modified_base 22: mod_base = gm
  source 1..22: mol_type = other RNA
tatcactaaataagtcaactgg

SEQ ID NO: 520 - RNA, 22 nt, synthetic construct
  misc_feature 1..4: note = linked via phosphorothioate
  modified_base 1: mod_base = OTHER; note = 4'-O-monomethylphosphonate-2'-O-methylmethyluridine
  modified_base 2: mod_base = OTHER; note = 2'-Fluoro-adenosine
  modified_base 3: mod_base = OTHER; note = 2'-Fluoro-uridine
  modified_base 4: mod_base = OTHER; note = 2'-Fluoro-cytidine
  modified_base 5: mod_base = OTHER; note = 2'-Fluoro-adenosine
  modified_base 6: mod_base = cm
  modified_base 7: mod_base = OTHER; note = 2'-Fluoro-uridine
  modified_base 8: mod_base = OTHER; note = 2'-O-methyl-adenosine
  modified_base 9: mod_base = OTHER; note = 2'-O-methyl-adenosine
  modified_base 10: mod_base = OTHER; note = 2'-Fluoro-adenosine
  modified_base 11: mod_base = um
  modified_base 12: mod_base = OTHER; note = 2'-O-methyl-adenosine
  modified_base 13: mod_base = OTHER; note = 2'-O-methyl-adenosine
  modified_base 14: mod_base = OTHER; note = 2'-Fluoro-guanosine
  modified_base 15: mod_base = um
  modified_base 16: mod_base = cm
  modified_base 17: mod_base = OTHER; note = 2'-O-methyl-adenosine
  modified_base 18: mod_base = OTHER; note = 2'-O-methyl-adenosine
  modified_base 19: mod_base = cm
  misc_feature 20..22: note = linked via phosphorothioate
  modified_base 20: mod_base = um
  modified_base 21: mod_base = gm
  modified_base 22: mod_base = gm
  source 1..22: mol_type = other RNA
tatcactaaataagtcaactgg

SEQ ID NO: 521 - RNA, 22 nt, synthetic construct
  misc_feature 1..4: note = linked via phosphorothioate
  modified_base 1: mod_base = OTHER; note = 4'-O-monomethylphosphonate-2'-O-methylmethyluridine
  modified_base 2: mod_base = OTHER; note = 2'-Fluoro-adenosine
  modified_base 3: mod_base = OTHER; note = 2'-Fluoro-uridine
  modified_base 4: mod_base = OTHER; note = 2'-Fluoro-cytidine
  modified_base 5: mod_base = OTHER; note = 2'-Fluoro-adenosine
  modified_base 6: mod_base = cm
  modified_base 7: mod_base = OTHER; note = 2'-Fluoro-uridine
  modified_base 8: mod_base = OTHER; note = 2'-O-methyl-adenosine
  modified_base 9: mod_base = OTHER; note = 2'-O-methyl-adenosine
  modified_base 10: mod_base = OTHER; note = 2'-Fluoro-adenosine
  modified_base 11: mod_base = um
  modified_base 12: mod_base = OTHER; note = 2'-O-methyl-adenosine
  modified_base 13: mod_base = OTHER; note = 2'-O-methyl-adenosine
  misc_feature 14..22: note = linked via phosphorothioate
  modified_base 14: mod_base = OTHER; note = 2'-Fluoro-guanosine
  modified_base 15: mod_base = um
  modified_base 16: mod_base = cm
  modified_base 17: mod_base = OTHER; note = 2'-O-methyl-adenosine
  modified_base 18: mod_base = OTHER; note = 2'-O-methyl-adenosine
  modified_base 19: mod_base = cm
  modified_base 20: mod_base = um
  modified_base 21: mod_base = gm
  modified_base 22: mod_base = gm
  source 1..22: mol_type = other RNA
tatcactaaataagtcaactgg

SEQ ID NO: 522 - RNA, 22 nt, synthetic construct
  misc_feature 1..4: note = linked via phosphorothioate
  modified_base 1: mod_base = OTHER; note = 4'-O-monomethylphosphonate-2'-O-methylmethyluridine
  modified_base 2: mod_base = OTHER; note = 2'-Fluoro-adenosine
  modified_base 3: mod_base = OTHER; note = 2'-Fluoro-uridine
  modified_base 4: mod_base = OTHER; note = 2'-Fluoro-cytidine
  modified_base 5: mod_base = OTHER; note = 2'-Fluoro-adenosine
  modified_base 6: mod_base = cm
  modified_base 7: mod_base = OTHER; note = 2'-Fluoro-uridine
  modified_base 8: mod_base = OTHER; note = 2'-O-methyl-adenosine
  modified_base 9: mod_base = OTHER; note = 2'-O-methyl-adenosine
  modified_base 10: mod_base = OTHER; note = 2'-Fluoro-adenosine
  modified_base 11: mod_base = um
  modified_base 12: mod_base = OTHER; note = 2'-O-methyl-adenosine
  modified_base 13: mod_base = OTHER; note = 2'-O-methyl-adenosine
  modified_base 14: mod_base = OTHER; note = 2'-Fluoro-guanosine
  modified_base 15: mod_base = um
  modified_base 16: mod_base = cm
  modified_base 17: mod_base = OTHER; note = 2'-O-methyl-adenosine
  modified_base 18: mod_base = OTHER; note = 2'-O-methyl-adenosine
  modified_base 19: mod_base = cm
  misc_feature 20..22: note = linked via phosphorothioate
  modified_base 20: mod_base = um
  modified_base 21: mod_base = gm
  modified_base 22: mod_base = gm
  source 1..22: mol_type = other RNA
tatcactaaataagtcaactgg

SEQ ID NO: 523 - RNA, 22 nt, synthetic construct
  misc_feature 1..4: note = linked via phosphorothioate
  modified_base 1: mod_base = OTHER; note = 4'-O-monomethylphosphonate-2'-O-methylmethyluridine
  modified_base 2: mod_base = OTHER; note = 2'-Fluoro-adenosine
  modified_base 3: mod_base = OTHER; note = 2'-Fluoro-uridine
  modified_base 4: mod_base = OTHER; note = 2'-Fluoro-cytidine
  modified_base 5: mod_base = OTHER; note = 2'-Fluoro-adenosine
  modified_base 6: mod_base = cm
  modified_base 7: mod_base = OTHER; note = 2'-Fluoro-uridine
  modified_base 8: mod_base = OTHER; note = 2'-O-methyl-adenosine
  modified_base 9: mod_base = OTHER; note = 2'-O-methyl-adenosine
  modified_base 10: mod_base = OTHER; note = 2'-Fluoro-adenosine
  modified_base 11: mod_base = um
  modified_base 12: mod_base = OTHER; note = 2'-O-methyl-adenosine
  modified_base 13: mod_base = OTHER; note = 2'-O-methyl-adenosine
  modified_base 14: mod_base = OTHER; note = 2'-Fluoro-guanosine
  modified_base 15: mod_base = um
  modified_base 16: mod_base = cm
  modified_base 17: mod_base = OTHER; note = 2'-O-methyl-adenosine
  modified_base 18: mod_base = OTHER; note = 2'-O-methyl-adenosine
  modified_base 19: mod_base = cm
  misc_feature 20..22: note = linked via phosphorothioate
  modified_base 20: mod_base = um
  modified_base 21: mod_base = gm
  modified_base 22: mod_base = gm
  source 1..22: mol_type = other RNA
tatcactaaataagtcaactgg

SEQ ID NO: 524 - RNA, 22 nt, synthetic construct
  misc_feature 1..4: note = linked via phosphorothioate
  modified_base 1: mod_base = OTHER; note = 4'-O-monomethylphosphonate-2'-O-methylmethyluridine
  modified_base 2: mod_base = OTHER; note = 2'-Fluoro-adenosine
  modified_base 3: mod_base = OTHER; note = 2'-Fluoro-uridine
  modified_base 4: mod_base = OTHER; note = 2'-Fluoro-cytidine
  modified_base 5: mod_base = OTHER; note = 2'-Fluoro-adenosine
  modified_base 6: mod_base = cm
  modified_base 7: mod_base = OTHER; note = 2'-Fluoro-uridine
  modified_base 8: mod_base = OTHER; note = 2'-O-methyl-adenosine
  modified_base 9: mod_base = OTHER; note = 2'-O-methyl-adenosine
  modified_base 10: mod_base = OTHER; note = 2'-Fluoro-adenosine
  modified_base 11: mod_base = um
  modified_base 12: mod_base = OTHER; note = 2'-O-methyl-adenosine
  modified_base 13: mod_base = OTHER; note = 2'-O-methyl-adenosine
  modified_base 14: mod_base = OTHER; note = 2'-Fluoro-guanosine
  modified_base 15: mod_base = um
  modified_base 16: mod_base = cm
  modified_base 17: mod_base = OTHER; note = 2'-O-methyl-adenosine
  modified_base 18: mod_base = OTHER; note = 2'-O-methyl-adenosine
  modified_base 19: mod_base = cm
  misc_feature 20..22: note = linked via phosphorothioate
  modified_base 20: mod_base = um
  modified_base 21: mod_base = gm
  modified_base 22: mod_base = gm
  source 1..22: mol_type = other RNA
tatcactaaataagtcaactgg

SEQ ID NO: 525 - RNA, 22 nt, synthetic construct
  misc_feature 1..4: note = linked via phosphorothioate
  modified_base 1: mod_base = OTHER; note = 4'-O-monomethylphosphonate-2'-O-methylmethyluridine
  modified_base 2: mod_base = OTHER; note = 2'-Fluoro-adenosine
  modified_base 3: mod_base = OTHER; note = 2'-Fluoro-uridine
  modified_base 4: mod_base = OTHER; note = 2'-Fluoro-cytidine
  modified_base 5: mod_base = OTHER; note = 2'-Fluoro-adenosine
  modified_base 6: mod_base = cm
  modified_base 7: mod_base = OTHER; note = 2'-Fluoro-uridine
  modified_base 8: mod_base = OTHER; note = 2'-O-methyl-adenosine
  modified_base 9: mod_base = OTHER; note = 2'-O-methyl-adenosine
  modified_base 10: mod_base = OTHER; note = 2'-Fluoro-adenosine
  modified_base 11: mod_base = um
  modified_base 12: mod_base = OTHER; note = 2'-O-methyl-adenosine
  modified_base 13: mod_base = OTHER; note = 2'-O-methyl-adenosine
  modified_base 14: mod_base = OTHER; note = 2'-Fluoro-guanosine
  modified_base 15: mod_base = um
  modified_base 16: mod_base = cm
  modified_base 17: mod_base = OTHER; note = 2'-O-methyl-adenosine
  modified_base 18: mod_base = OTHER; note = 2'-O-methyl-adenosine
  modified_base 19: mod_base = cm
  misc_feature 20..22: note = linked via phosphorothioate
  modified_base 20: mod_base = um
  modified_base 21: mod_base = gm
  modified_base 22: mod_base = gm
  source 1..22: mol_type = other RNA
tatcactaaataagtcaactgg

SEQ ID NO: 526 - RNA, 16 nt, synthetic construct
  source 1..16: mol_type = other RNA
gcagccgaaaggctgc

SEQ ID NO: 527 - RNA, 32 nt, synthetic construct
  source 1..32: mol_type = other RNA
tgagaattgtgactgagcagccgaaaggctgc

SEQ ID NO: 528 - RNA, 30 nt, synthetic construct
  source 1..30: mol_type = other RNA
agaattgtgactgagcagccgaaaggctgc

SEQ ID NO: 529 - RNA, 28 nt, synthetic construct
  source 1..28: mol_type = other RNA
aattgtgactgagcagccgaaaggctgc

SEQ ID NO: 530 - RNA, 32 nt, synthetic construct; identical to SEQ ID NO: 527
  misc_feature 1^2: note = linked via phosphorothioate
  modified_base 1: mod_base = um
  modified_base 2: mod_base = gm
  modified_base 3: mod_base = OTHER; note = 2'-O-methyl-adenosine
  modified_base 4: mod_base = OTHER; note = 2'-Fluoro-guanosine
  modified_base 5: mod_base = OTHER; note = 2'-Fluoro-adenosine
  modified_base 6: mod_base = OTHER; note = 2'-Fluoro-adenosine
  modified_base 7: mod_base = OTHER; note = 2'-Fluoro-uridine
  modified_base 8: mod_base = um
  modified_base 9: mod_base = gm
  modified_base 10: mod_base = um
  modified_base 11: mod_base = gm
  modified_base 12: mod_base = OTHER; note = 2'-O-methyl-adenosine
  modified_base 13: mod_base = cm
  modified_base 14: mod_base = um
  modified_base 15: mod_base = gm
  modified_base 16: mod_base = OTHER; note = 2'-O-methyl-adenosine
  modified_base 17: mod_base = gm
  modified_base 18: mod_base = cm
  modified_base 19: mod_base = OTHER; note = 2'-O-methyl-adenosine
  modified_base 20: mod_base = gm
  modified_base 21: mod_base = cm
  modified_base 22: mod_base = cm
  modified_base 23: mod_base = gm
  modified_base 24: mod_base = OTHER; note = hexadecanamidodiethoxymethanol-adenosine
  modified_base 25: mod_base = OTHER; note = 2'-O-methyl-adenosine
  modified_base 26: mod_base = OTHER; note = 2'-O-methyl-adenosine
  modified_base 27: mod_base = gm
  modified_base 28: mod_base = gm
  modified_base 29: mod_base = cm
  modified_base 30: mod_base = um
  modified_base 31: mod_base = gm
  modified_base 32: mod_base = cm
  source 1..32: mol_type = other RNA

SEQ ID NO: 531 - RNA, 30 nt, synthetic construct; identical to SEQ ID NO: 528
  misc_feature 1^2: note = linked via phosphorothioate
  modified_base 1: mod_base = OTHER; note = 2'-O,4'-C-Methyleneadenosine
  modified_base 2: mod_base = OTHER; note = 2'-Fluoro-guanosine
  modified_base 3: mod_base = OTHER; note = 2'-Fluoro-adenosine
  modified_base 4: mod_base = OTHER; note = 2'-Fluoro-adenosine
  modified_base 5: mod_base = OTHER; note = 2'-Fluoro-uridine
  modified_base 6: mod_base = um
  modified_base 7: mod_base = gm
  modified_base 8: mod_base = um
  modified_base 9: mod_base = gm
  modified_base 10: mod_base = OTHER; note = 2'-O-methyl-adenosine
  modified_base 11: mod_base = cm
  modified_base 12: mod_base = um
  modified_base 13: mod_base = gm
  modified_base 14: mod_base = OTHER; note = 2'-O-methyl-adenosine
  modified_base 15: mod_base = gm
  modified_base 16: mod_base = cm
  modified_base 17: mod_base = OTHER; note = 2'-O-methyl-adenosine
  modified_base 18: mod_base = gm
  modified_base 19: mod_base = cm
  modified_base 20: mod_base = cm
  modified_base 21: mod_base = gm
  modified_base 22: mod_base = OTHER; note = hexadecanamidodiethoxymethanol-adenosine
  modified_base 23: mod_base = OTHER; note = 2'-O-methyl-adenosine
  modified_base 24: mod_base = OTHER; note = 2'-O-methyl-adenosine
  modified_base 25: mod_base = gm
  modified_base 26: mod_base = gm
  modified_base 27: mod_base = cm
  modified_base 28: mod_base = um
  modified_base 29: mod_base = gm
  modified_base 30: mod_base = cm
  source 1..30: mol_type = other RNA

SEQ ID NO: 532 - RNA, 28 nt, synthetic construct
  misc_feature 1^2: note = linked via phosphorothioate
  modified_base 1: mod_base = OTHER; note = 2'-O,4'-C-Methyleneadenosine
  modified_base 2: mod_base = OTHER; note = 2'-Fluoro-adenosine
  modified_base 3: mod_base = OTHER; note = 2'-Fluoro-uridine
  modified_base 4: mod_base = um
  modified_base 5: mod_base = gm
  modified_base 6: mod_base = um
  modified_base 7: mod_base = gm
  modified_base 8: mod_base = OTHER; note = 2'-O-methyl-adenosine
  modified_base 9: mod_base = cm
  modified_base 10: mod_base = um
  modified_base 11: mod_base = gm
  modified_base 12: mod_base = OTHER; note = 2'-O-methyl-adenosine
  modified_base 13: mod_base = gm
  modified_base 14: mod_base = cm
  modified_base 15: mod_base = OTHER; note = 2'-O-methyl-adenosine
  modified_base 16: mod_base = gm
  modified_base 17: mod_base = cm
  modified_base 18: mod_base = cm
  modified_base 19: mod_base = gm
  modified_base 20: mod_base = OTHER; note = hexadecanamidodiethoxymethanol-adenosine
  modified_base 21: mod_base = OTHER; note = 2'-O-methyl-adenosine
  modified_base 22: mod_base = OTHER; note = 2'-O-methyl-adenosine
  modified_base 23: mod_base = gm
  modified_base 24: mod_base = gm
  modified_base 25: mod_base = cm
  modified_base 26: mod_base = um
  modified_base 27: mod_base = gm
  modified_base 28: mod_base = cm
  source 1..28: mol_type = other RNA
aattgtgactgagcagccgaaaggctgc

SEQ ID NO: 533 - RNA, 22 nt, synthetic construct
  misc_feature 1..4: note = linked via phosphorothioate
  modified_base 1: mod_base = OTHER; note = 4'-O-monomethylphosphonate-2'-O-methylmethyluridine
  modified_base 2: mod_base = OTHER; note = 2'-Fluoro-cytidine
  modified_base 3: mod_base = OTHER; note = 2'-Fluoro-adenosine
  modified_base 4: mod_base = OTHER; note = 2'-Fluoro-guanosine
  modified_base 5: mod_base = OTHER; note = 2'-Fluoro-uridine
  modified_base 6: mod_base = cm
  modified_base 7: mod_base = OTHER; note = 2'-Fluoro-adenosine
  modified_base 8: mod_base = cm
  modified_base 9: mod_base = OTHER; note = 2'-O-methyl-adenosine
  modified_base 10: mod_base = OTHER; note = 2'-Fluoro-adenosine
  modified_base 11: mod_base = um
  modified_base 12: mod_base = um
  misc_feature 13..15: note = linked via phosphorothioate
  modified_base 13: mod_base = cm
  modified_base 14: mod_base = OTHER; note = 2'-Fluoro-uridine
  modified_base 15: mod_base = cm
  modified_base 16: mod_base = OTHER; note = 2'-O-methyl-adenosine
  modified_base 17: mod_base = cm
  modified_base 18: mod_base = OTHER; note = 2'-O-methyl-adenosine
  modified_base 19: mod_base = cm
  misc_feature 20..22: note = linked via phosphorothioate
  modified_base 20: mod_base = um
  modified_base 21: mod_base = gm
  modified_base 22: mod_base = gm
  source 1..22: mol_type = other RNA
tcagtcacaattctcacactgg

SEQ ID NO: 534 - RNA, 22 nt, synthetic construct
  misc_feature 1..4: note = linked via phosphorothioate
  modified_base 1: mod_base = OTHER; note = 4'-O-monomethylphosphonate-2'-O-methylmethyluridine
  modified_base 2: mod_base = OTHER; note = 2'-Fluoro-cytidine
  modified_base 3: mod_base = OTHER; note = 2'-Fluoro-adenosine
  modified_base 4: mod_base = OTHER; note = 2'-Fluoro-guanosine
  modified_base 5: mod_base = OTHER; note = 2'-Fluoro-uridine
  modified_base 6: mod_base = cm
  modified_base 7: mod_base = OTHER; note = 2'-Fluoro-adenosine
  modified_base 8: mod_base = cm
  modified_base 9: mod_base = OTHER; note = 2'-O-methyl-adenosine
  modified_base 10: mod_base = OTHER; note = 2'-Fluoro-adenosine
  modified_base 11: mod_base = um
  modified_base 12: mod_base = um
  modified_base 13: mod_base = cm
  modified_base 14: mod_base = OTHER; note = 2'-Fluoro-uridine
  modified_base 15: mod_base = cm
  misc_feature 16..22: note = linked via phosphorothioate
  modified_base 16: mod_base = OTHER; note = 2'-O-methyl-adenosine
  modified_base 17: mod_base = cm
  modified_base 18: mod_base = OTHER; note = 2'-O-methyl-adenosine
  modified_base 19: mod_base = cm
  modified_base 20: mod_base = um
  modified_base 21: mod_base = gm
  modified_base 22: mod_base = gm
  source 1..22: mol_type = other RNA
tcagtcacaattctcacactgg

SEQ ID NO: 535 - RNA, 22 nt, synthetic construct
  misc_feature 1..4: note = linked via phosphorothioate
  modified_base 1: mod_base = OTHER; note = 4'-O-monomethylphosphonate-2'-O-methylmethyluridine
  modified_base 2: mod_base = OTHER; note = 2'-Fluoro-cytidine
  modified_base 3: mod_base = OTHER; note = 2'-Fluoro-adenosine
  modified_base 4: mod_base = OTHER; note = 2'-Fluoro-guanosine
  modified_base 5: mod_base = OTHER; note = 2'-Fluoro-uridine
  modified_base 6: mod_base = cm
  modified_base 7: mod_base = OTHER; note = 2'-Fluoro-adenosine
  modified_base 8: mod_base = cm
  modified_base 9: mod_base = OTHER; note = 2'-O-methyl-adenosine
  modified_base 10: mod_base = OTHER; note = 2'-Fluoro-adenosine
  modified_base 11: mod_base = um
  modified_base 12: mod_base = um
  misc_feature 13..22: note = linked via phosphorothioate
  modified_base 13: mod_base = cm
  modified_base 14: mod_base = OTHER; note = 2'-Fluoro-uridine
  modified_base 15: mod_base = cm
  modified_base 16: mod_base = OTHER; note = 2'-O-methyl-adenosine
  modified_base 17: mod_base = cm
  modified_base 18: mod_base = OTHER; note = 2'-O-methyl-adenosine
  modified_base 19: mod_base = cm
  modified_base 20: mod_base = um
  modified_base 21: mod_base = gm
  modified_base 22: mod_base = gm
  source 1..22: mol_type = other RNA
tcagtcacaattctcacactgg

SEQ ID NO: 536 - RNA, 22 nt, synthetic construct
  misc_feature 1..4: note = linked via phosphorothioate
  modified_base 1: mod_base = OTHER; note = 4'-O-monomethylphosphonate-2'-O-methylmethyluridine
  modified_base 2: mod_base = OTHER; note = 2'-Fluoro-cytidine
  modified_base 3: mod_base = OTHER; note = 2'-Fluoro-adenosine
  modified_base 4: mod_base = OTHER; note = 2'-Fluoro-guanosine
  modified_base 5: mod_base = OTHER; note = 2'-Fluoro-uridine
  modified_base 6: mod_base = cm
  modified_base 7: mod_base = OTHER; note = 2'-Fluoro-adenosine
  modified_base 8: mod_base = cm
  modified_base 9: mod_base = OTHER; note = 2'-O-methyl-adenosine
  modified_base 10: mod_base = OTHER; note = 2'-Fluoro-adenosine
  modified_base 11: mod_base = um
  misc_feature 12..22: note = linked via phosphorothioate
  modified_base 12: mod_base = um
  modified_base 13: mod_base = cm
  modified_base 14: mod_base = OTHER; note = 2'-Fluoro-uridine
  modified_base 15: mod_base = cm
  modified_base 16: mod_base = OTHER; note = 2'-O-methyl-adenosine
  modified_base 17: mod_base = cm
  modified_base 18: mod_base = OTHER; note = 2'-O-methyl-adenosine
  modified_base 19: mod_base = cm
  modified_base 20: mod_base = um
  modified_base 21: mod_base = gm
  modified_base 22: mod_base = gm
  source 1..22: mol_type = other RNA
tcagtcacaattctcacactgg

SEQ ID NO: 537 - RNA, 14 nt, synthetic construct
  source 1..14: mol_type = other RNA
agaattgtgactga

SEQ ID NO: 538 - DNA, 14 bp, synthetic construct
  misc_feature 1..11: note = RNA fragment
  misc_feature 12: note = DNA fragment
  misc_feature 13..14: note = RNA fragment
  source 1..14: mol_type = other DNA
agaattgtgactga

SEQ ID NO: 539 - RNA, 20 nt, synthetic construct
  misc_feature 1^2: note = linked via phosphorothioate
  modified_base 1: mod_base = OTHER; note = hexadecanamidodiethoxymethanol-adenosine
  modified_base 2: mod_base = OTHER; note = 2'-O,4'-C-Methyleneguanosine
  modified_base 3: mod_base = um
  modified_base 4: mod_base = gm
  modified_base 5: mod_base = um
  modified_base 6: mod_base = gm
  modified_base 7: mod_base = OTHER; note = 2'-O-methyl-adenosine
  modified_base 8: mod_base = OTHER; note = 2'-Fluoro-guanosine
  modified_base 9: mod_base = OTHER; note = 2'-Fluoro-adenosine
  modified_base 10: mod_base = OTHER; note = 2'-Fluoro-adenosine
  modified_base 11: mod_base = OTHER; note = 2'-Fluoro-uridine
  modified_base 12: mod_base = um
  modified_base 13: mod_base = gm
  modified_base 14: mod_base = um
  modified_base 15: mod_base = gm
  modified_base 16: mod_base = OTHER; note = 2'-O-methyl-adenosine
  modified_base 17: mod_base = cm
  misc_feature 18..20: note = linked via phosphorothioate
  modified_base 18: mod_base = um
  modified_base 19: mod_base = gm
  modified_base 20: mod_base = OTHER; note = 2'-O-methyl-adenosine
  source 1..20: mol_type = other RNA
agtgtgagaattgtgactga

SEQ ID NO: 540 - RNA, 20 nt, synthetic construct
  misc_feature 1^2: note = linked via phosphorothioate
  modified_base 1: mod_base = OTHER; note = hexadecanamidodiethoxymethanol-adenosine
  modified_base 2: mod_base = OTHER; note = 2'-O,4'-C-Methyleneguanosine
  modified_base 3: mod_base = um
  modified_base 4: mod_base = gm
  modified_base 5: mod_base = um
  modified_base 6: mod_base = gm
  modified_base 7: mod_base = OTHER; note = 2'-O-methyl-adenosine
  modified_base 8: mod_base = OTHER; note = 2'-Fluoro-guanosine
  modified_base 9: mod_base = OTHER; note = 2'-Fluoro-adenosine
  modified_base 10: mod_base = OTHER; note = 2'-Fluoro-adenosine
  modified_base 11: mod_base = OTHER; note = 2'-Fluoro-uridine
  modified_base 12: mod_base = um
  modified_base 13: mod_base = gm
  modified_base 14: mod_base = um
  modified_base 15: mod_base = OTHER; note = 2'-O,4'-C-Methyleneguanosine
  modified_base 16: mod_base = OTHER; note = 2'-O-methyl-adenosine
  modified_base 17: mod_base = cm
  misc_feature 18..20: note = linked via phosphorothioate
  modified_base 18: mod_base = um
  modified_base 19: mod_base = gm
  modified_base 20: mod_base = OTHER; note = 2'-O-methyl-adenosine
  source 1..20: mol_type = other RNA
agtgtgagaattgtgactga

SEQ ID NO: 541 - RNA, 20 nt, synthetic construct
  misc_feature 1^2: note = linked via phosphorothioate
  modified_base 1: mod_base = OTHER; note = hexadecanamidodiethoxymethanol-adenosine
  modified_base 2: mod_base = OTHER; note = 2'-O,4'-C-Methyleneguanosine
  modified_base 3: mod_base = um
  modified_base 4: mod_base = gm
  modified_base 5: mod_base = um
  modified_base 6: mod_base = gm
  modified_base 7: mod_base = OTHER; note = 2'-O-methyl-adenosine
  modified_base 8: mod_base = OTHER; note = 2'-Fluoro-guanosine
  modified_base 9: mod_base = OTHER; note = 2'-Fluoro-adenosine
  modified_base 10: mod_base = OTHER; note = 2'-Fluoro-adenosine
  modified_base 11: mod_base = OTHER; note = 2'-Fluoro-uridine
  modified_base 12: mod_base = um
  modified_base 13: mod_base = gm
  modified_base 14: mod_base = um
  modified_base 15: mod_base = OTHER; note = 2'-O,4'-C-Methyleneguanosine
  modified_base 16: mod_base = OTHER; note = 2'-O,4'-C-Methyleneadenosine
  modified_base 17: mod_base = cm
  misc_feature 18..20: note = linked via phosphorothioate
  modified_base 18: mod_base = um
  modified_base 19: mod_base = gm
  modified_base 20: mod_base = OTHER; note = 2'-O-methyl-adenosine
  source 1..20: mol_type = other RNA
agtgtgagaattgtgactga

SEQ ID NO: 542 - RNA, 14 nt, synthetic construct
  misc_feature 1^2: note = linked via phosphorothioate
  modified_base 1: mod_base = OTHER; note = hexadecanamidodiethoxymethanol-adenosine
  modified_base 2: mod_base = OTHER; note = 2'-Fluoro-guanosine
  modified_base 3: mod_base = OTHER; note = 2'-Fluoro-adenosine
  modified_base 4: mod_base = OTHER; note = 2'-Fluoro-adenosine
  modified_base 5: mod_base = OTHER; note = 2'-Fluoro-uridine
  modified_base 6: mod_base = um
  modified_base 7: mod_base = gm
  modified_base 8: mod_base = um
  modified_base 9: mod_base = gm
  modified_base 10: mod_base = OTHER; note = 2'-O-methyl-adenosine
  modified_base 11: mod_base = cm
  misc_feature 12..14: note = linked via phosphorothioate
  modified_base 12: mod_base = um
  modified_base 13: mod_base = gm
  modified_base 14: mod_base = OTHER; note = 2'-O-methyl-adenosine
  source 1..14: mol_type = other RNA
agaattgtgactga

SEQ ID NO: 543 - RNA, 14 nt, synthetic construct
  misc_feature 1^2: note = linked via phosphorothioate
  modified_base 1: mod_base = OTHER; note = hexadecanamidodiethoxymethanol-adenosine
  modified_base 2: mod_base = OTHER; note = 2'-O,4'-C-Methyleneguanosine
  modified_base 3: mod_base = OTHER; note = 2'-Fluoro-adenosine
  modified_base 4: mod_base = OTHER; note = 2'-Fluoro-adenosine
  modified_base 5: mod_base = OTHER; note = 2'-Fluoro-uridine
  modified_base 6: mod_base = um
  modified_base 7: mod_base = gm
  modified_base 8: mod_base = um
  modified_base 9: mod_base = gm
  modified_base 10: mod_base = OTHER; note = 2'-O-methyl-adenosine
  modified_base 11: mod_base = cm
  misc_feature 12..14: note = linked via phosphorothioate
  modified_base 12: mod_base = um
  modified_base 13: mod_base = gm
  modified_base 14: mod_base = OTHER; note = 2'-O-methyl-adenosine
  source 1..14: mol_type = other RNA
agaattgtgactga

SEQ ID NO: 544 - RNA, 14 nt, synthetic construct
  misc_feature 1^2: note = linked via phosphorothioate
  modified_base 1: mod_base = OTHER; note = hexadecanamidodiethoxymethanol-adenosine
  modified_base 2: mod_base = OTHER; note = 2'-O,4'-C-Methyleneguanosine
  modified_base 3: mod_base = OTHER; note = 2'-Fluoro-adenosine
  modified_base 4: mod_base = OTHER; note = 2'-Fluoro-adenosine
  modified_base 5: mod_base = OTHER; note = 2'-Fluoro-uridine
  modified_base 6: mod_base = um
  modified_base 7: mod_base = gm
  modified_base 8: mod_base = um
  modified_base 9: mod_base = OTHER; note = 2'-O,4'-C-Methyleneguanosine
  modified_base 10: mod_base = OTHER; note = 2'-O-methyl-adenosine
  modified_base 11: mod_base = cm
  misc_feature 12..14: note = linked via phosphorothioate
  modified_base 12: mod_base = um
  modified_base 13: mod_base = gm
  modified_base 14: mod_base = OTHER; note = 2'-O-methyl-adenosine
  source 1..14: mol_type = other RNA
agaattgtgactga

SEQ ID NO: 545 - RNA, 14 nt, synthetic construct
  misc_feature 1^2: note = linked via phosphorothioate
  modified_base 1: mod_base = OTHER; note = hexadecanamidodiethoxymethanol-adenosine
  modified_base 2: mod_base = OTHER; note = 2'-O,4'-C-Methyleneguanosine
  modified_base 3: mod_base = OTHER; note = 2'-Fluoro-adenosine
  modified_base 4: mod_base = OTHER; note = 2'-Fluoro-adenosine
  modified_base 5: mod_base = OTHER; note = 2'-Fluoro-uridine
  modified_base 6: mod_base = um
  modified_base 7: mod_base = gm
  modified_base 8: mod_base = um
  modified_base 9: mod_base = OTHER; note = 2'-O,4'-C-Methyleneguanosine
  modified_base 10: mod_base = OTHER; note = 2'-O,4'-C-Methyleneadenosine
  modified_base 11: mod_base = cm
  misc_feature 12..14: note = linked via phosphorothioate
  modified_base 12: mod_base = um
  modified_base 13: mod_base = gm
  modified_base 14: mod_base = OTHER; note = 2'-O-methyl-adenosine
  source 1..14: mol_type = other RNA
agaattgtgactga

SEQ ID NO: 546 - DNA, 14 bp, synthetic construct
  misc_feature 1..11: note = RNA fragment
  misc_feature 12: note = DNA fragment
  misc_feature 13..14: note = RNA fragment
  misc_feature 1^2: note = linked via phosphorothioate
  modified_base 1: mod_base = OTHER; note = hexadecanamidodiethoxymethanol-adenosine
  modified_base 2: mod_base = OTHER; note = 2'-O,4'-C-Methyleneguanosine
  modified_base 3: mod_base = OTHER; note = 2'-Fluoro-adenosine
  modified_base 4: mod_base = OTHER; note = 2'-Fluoro-adenosine
  modified_base 5: mod_base = OTHER; note = 2'-Fluoro-uridine
  modified_base 6: mod_base = um
  modified_base 7: mod_base = gm
  modified_base 8: mod_base = um
  modified_base 9: mod_base = OTHER; note = 2'-O,4'-C-Methyleneguanosine
  modified_base 10: mod_base = OTHER; note = 2'-O,4'-C-Methyleneadenosine
  modified_base 11: mod_base = cm
  misc_feature 12..14: note = linked via phosphorothioate
  modified_base 12: mod_base = OTHER; note = 2'-O,4'-C-Methylenethymine
  modified_base 13: mod_base = OTHER; note = 2'-O,4'-C-Methyleneguanosine
  modified_base 14: mod_base = OTHER; note = 2'-O-methyl-adenosine
  source 1..14: mol_type = other DNA
agaattgtgactga

SEQ ID NO: 547 - RNA, 20 nt, synthetic construct
  misc_feature 1^2: note = linked via phosphorothioate
  modified_base 1: mod_base = OTHER; note = 2'-O-methyl-adenosine
  modified_base 2: mod_base = gm
  modified_base 3: mod_base = um
  modified_base 4: mod_base = gm
  modified_base 5: mod_base = um
  modified_base 6: mod_base = gm
  modified_base 7: mod_base = OTHER; note = 2'-O-methyl-adenosine
  modified_base 8: mod_base = OTHER; note = 2'-Fluoro-guanosine
  modified_base 9: mod_base = OTHER; note = 2'-Fluoro-adenosine
  modified_base 10: mod_base = OTHER; note = 2'-Fluoro-adenosine
  modified_base 11: mod_base = OTHER; note = 2'-Fluoro-uridine
  modified_base 12: mod_base = um
  modified_base 13: mod_base = gm
  modified_base 14: mod_base = um
  modified_base 15: mod_base = gm
  modified_base 16: mod_base = OTHER; note = 2'-O-methyl-adenosine
  modified_base 17: mod_base = cm
  misc_feature 18..20: note = linked via phosphorothioate
  modified_base 18: mod_base = um
  modified_base 19: mod_base = gm
  modified_base 20: mod_base = OTHER; note = 2'-O-methyl-adenosine
  source 1..20: mol_type = other RNA
agtgtgagaattgtgactga

SEQ ID NO: 548 - DNA, 20 bp, synthetic construct
  misc_feature 1..17: note = RNA fragment
  misc_feature 18: note = DNA fragment
  misc_feature 19..20: note = RNA fragment
  misc_feature 1^2: note = linked via phosphorothioate
  modified_base 1: mod_base = OTHER; note = hexadecanamidodiethoxymethanol-adenosine
  modified_base 2: mod_base = OTHER; note = 2'-O,4'-C-Methyleneguanosine
  modified_base 3: mod_base = um
  modified_base 4: mod_base = gm
  modified_base 5: mod_base = um
  modified_base 6: mod_base = gm
  modified_base 7: mod_base = OTHER; note = 2'-O-methyl-adenosine
  modified_base 8: mod_base = OTHER; note = 2'-Fluoro-guanosine
  modified_base 9: mod_base = OTHER; note = 2'-Fluoro-adenosine
  modified_base 10: mod_base = OTHER; note = 2'-Fluoro-adenosine
  modified_base 11: mod_base = OTHER; note = 2'-Fluoro-uridine
  modified_base 12: mod_base = um
  modified_base 13: mod_base = gm
  modified_base 14: mod_base = um
  modified_base 15: mod_base = OTHER; note = 2'-O,4'-C-Methyleneguanosine
  modified_base 16: mod_base = OTHER; note = 2'-O,4'-C-Methyleneadenosine
  modified_base 17: mod_base = cm
  misc_feature 18..20: note = linked via phosphorothioate
  modified_base 18: mod_base = OTHER; note = 2'-O,4'-C-Methylenethymine
  modified_base 19: mod_base = gm
  modified_base 20: mod_base = OTHER; note = 2'-O-methyl-adenosine
  source 1..20: mol_type = other DNA
agtgtgagaattgtgactga

SEQ ID NO: 549 - RNA, 16 nt, synthetic construct
  source 1..16: mol_type = other RNA
tgagaattgtgactga

SEQ ID NO: 550 - DNA, 16 bp, synthetic construct
  misc_feature 1..13: note = RNA fragment
  misc_feature 14: note = DNA fragment
  misc_feature 15..16: note = RNA fragment
  source 1..16: mol_type = other DNA
tgagaattgtgactga

SEQ ID NO: 551 - RNA, 16 nt, synthetic construct
  misc_feature 1^2: note = linked via phosphorothioate
  modified_base 1: mod_base = OTHER; note = hexadecanamidodiethoxymethanol-uridine
  modified_base 2: mod_base = gm
  modified_base 3: mod_base = OTHER; note = 2'-O-methyl-adenosine
  modified_base 4: mod_base = OTHER; note = 2'-Fluoro-guanosine
  modified_base 5: mod_base = OTHER; note = 2'-Fluoro-adenosine
  modified_base 6: mod_base = OTHER; note = 2'-Fluoro-adenosine
  modified_base 7: mod_base = OTHER; note = 2'-Fluoro-uridine
  modified_base 8: mod_base = um
  modified_base 9: mod_base = gm
  modified_base 10: mod_base = um
  modified_base 11: mod_base = gm
  modified_base 12: mod_base = OTHER; note = 2'-O-methyl-adenosine
  modified_base 13: mod_base = cm
  misc_feature 14..16: note = linked via phosphorothioate
  modified_base 14: mod_base = um
  modified_base 15: mod_base = gm
  modified_base 16: mod_base = OTHER; note = 2'-O-methyl-adenosine
  source 1..16: mol_type = other RNA
tgagaattgtgactga

SEQ ID NO: 552 - RNA, 16 nt, synthetic construct
  misc_feature 1^2: note = linked via phosphorothioate
  modified_base 1: mod_base = OTHER; note = hexadecanamidodiethoxymethanol-uridine
  modified_base 2: mod_base = OTHER; note = 2'-O,4'-C-Methyleneguanosine
  modified_base 3: mod_base = OTHER; note = 2'-O-methyl-adenosine
  modified_base 4: mod_base = OTHER; note = 2'-Fluoro-guanosine
  modified_base 5: mod_base = OTHER; note = 2'-Fluoro-adenosine
  modified_base 6: mod_base = OTHER; note = 2'-Fluoro-adenosine
  modified_base 7: mod_base = OTHER; note = 2'-Fluoro-uridine
  modified_base 8: mod_base = um
  modified_base 9: mod_base = gm
  modified_base 10: mod_base = um
  modified_base 11: mod_base = gm
  modified_base 12: mod_base = OTHER; note = 2'-O-methyl-adenosine
  modified_base 13: mod_base = cm
  misc_feature 14..16: note = linked via phosphorothioate
  modified_base 14: mod_base = um
  modified_base 15: mod_base = gm
  modified_base 16: mod_base = OTHER; note = 2'-O-methyl-adenosine
  source 1..16: mol_type = other RNA
tgagaattgtgactga

SEQ ID NO: 553 - RNA, 16 nt, synthetic construct
  misc_feature 1^2: note = linked via phosphorothioate
  modified_base 1: mod_base = OTHER; note = hexadecanamidodiethoxymethanol-uridine
  modified_base 2: mod_base = OTHER; note = 2'-O,4'-C-Methyleneguanosine
  modified_base 3: mod_base = OTHER; note = 2'-O-methyl-adenosine
  modified_base 4: mod_base = OTHER; note = 2'-Fluoro-guanosine
  modified_base 5: mod_base = OTHER; note = 2'-Fluoro-adenosine
  modified_base 6: mod_base = OTHER; note = 2'-Fluoro-adenosine
  modified_base 7: mod_base = OTHER; note = 2'-Fluoro-uridine
  modified_base 8: mod_base = um
  modified_base 9: mod_base = gm
  modified_base 10: mod_base = um
  modified_base 11: mod_base = OTHER; note = 2'-O,4'-C-Methyleneguanosine
  modified_base 12: mod_base = OTHER; note = 2'-O-methyl-adenosine
  modified_base 13: mod_base = cm
  misc_feature 14..16: note = linked via phosphorothioate
  modified_base 14: mod_base = um
  modified_base 15: mod_base = gm
  modified_base 16: mod_base = OTHER; note = 2'-O-methyl-adenosine
  source 1..16: mol_type = other RNA
tgagaattgtgactga

SEQ ID NO: 554 - RNA, 16 nt, synthetic construct
  misc_feature 1^2: note = linked via phosphorothioate
  modified_base 1: mod_base = OTHER; note = hexadecanamidodiethoxymethanol-uridine
  modified_base 2: mod_base = OTHER; note = 2'-O,4'-C-Methyleneguanosine
  modified_base 3: mod_base = OTHER; note = 2'-O-methyl-adenosine
  modified_base 4: mod_base = OTHER; note = 2'-Fluoro-guanosine
  modified_base 5: mod_base = OTHER; note = 2'-Fluoro-adenosine
  modified_base 6: mod_base = OTHER; note = 2'-Fluoro-adenosine
  modified_base 7: mod_base = OTHER; note = 2'-Fluoro-uridine
  modified_base 8: mod_base = um
  modified_base 9: mod_base = gm
  modified_base 10: mod_base = um
  modified_base 11: mod_base = OTHER; note = 2'-O,4'-C-Methyleneguanosine
  modified_base 12: mod_base = OTHER; note = 2'-O,4'-C-Methyleneadenosine
  modified_base 13: mod_base = cm
  misc_feature 14..16: note = linked via phosphorothioate
  modified_base 14: mod_base = um
  modified_base 15: mod_base = gm
  modified_base 16: mod_base = OTHER; note = 2'-O-methyl-adenosine
  source 1..16: mol_type = other RNA
tgagaattgtgactga

SEQ ID NO: 555 - DNA, 16 bp, synthetic construct
  misc_feature 1..13: note = RNA fragment
  misc_feature 14: note = DNA fragment
  misc_feature 15..16: note = RNA fragment
  misc_feature 1^2: note = linked via phosphorothioate
  modified_base 1: mod_base = OTHER; note = hexadecanamidodiethoxymethanol-uridine
  modified_base 2: mod_base = OTHER; note = 2'-O,4'-C-Methyleneguanosine
  modified_base 3: mod_base = OTHER; note = 2'-O-methyl-adenosine
  modified_base 4: mod_base = OTHER; note = 2'-Fluoro-guanosine
  modified_base 5: mod_base = OTHER; note = 2'-Fluoro-adenosine
  modified_base 6: mod_base = OTHER; note = 2'-Fluoro-adenosine
  modified_base 7: mod_base = OTHER; note = 2'-Fluoro-uridine
  modified_base 8: mod_base = um
  modified_base 9: mod_base = gm
  modified_base 10: mod_base = um
  modified_base 11: mod_base = OTHER; note = 2'-O,4'-C-Methyleneguanosine
  modified_base 12: mod_base = OTHER; note = 2'-O,4'-C-Methyleneadenosine
  modified_base 13: mod_base = cm
  misc_feature 14..16: note = linked via phosphorothioate
  modified_base 14: mod_base = OTHER; note = 2'-O,4'-C-Methylenethymine
  modified_base 15: mod_base = gm
  modified_base 16: mod_base = OTHER; note = 2'-O-methyl-adenosine
  source 1..16: mol_type = other DNA
tgagaattgtgactga

SEQ ID NO: 556 - DNA, 16 bp, synthetic construct
  misc_feature 1..13: note = RNA fragment
  misc_feature 14: note = DNA fragment
  misc_feature 15..16: note = RNA fragment
  misc_feature 1^2: note = linked via phosphorothioate
  modified_base 1: mod_base = OTHER; note = hexadecanamidodiethoxymethanol-uridine
  modified_base 2: mod_base = OTHER; note = 2'-O,4'-C-Methyleneguanosine
  modified_base 3: mod_base = OTHER; note = 2'-O-methyl-adenosine
  modified_base 4: mod_base = OTHER; note = 2'-Fluoro-guanosine
  modified_base 5: mod_base = OTHER; note = 2'-Fluoro-adenosine
  modified_base 6: mod_base = OTHER; note = 2'-Fluoro-adenosine
  modified_base 7: mod_base = OTHER; note = 2'-Fluoro-uridine
  modified_base 8: mod_base = um
  modified_base 9: mod_base = gm
  modified_base 10: mod_base = um
  modified_base 11: mod_base = OTHER; note = 2'-O,4'-C-Methyleneguanosine
  modified_base 12: mod_base = OTHER; note = 2'-O,4'-C-Methyleneadenosine
  modified_base 13: mod_base = cm
  misc_feature 14..16: note = linked via phosphorothioate
  modified_base 14: mod_base = OTHER; note = 2'-O,4'-C-Methylenethymine
  modified_base 15: mod_base = OTHER; note = 2'-O,4'-C-Methyleneguanosine
  modified_base 16: mod_base = OTHER; note = 2'-O-methyl-adenosine
  source 1..16: mol_type = other DNA
tgagaattgtgactga

SEQ ID NO: 557 - RNA, 12 nt, synthetic construct
  source 1..12: mol_type = other RNA
aattgtgactga

SEQ ID NO: 558 - DNA, 12 bp, synthetic construct
  misc_feature 1..9: note = RNA fragment
  misc_feature 10: note = DNA fragment
  misc_feature 11..12: note = RNA fragment
  source 1..12: mol_type = other DNA
aattgtgactga

SEQ ID NO: 559 - RNA, 12 nt, synthetic construct
  misc_feature 1^2: note = linked via phosphorothioate
  modified_base 1: mod_base = OTHER; note = hexadecanamidodiethoxymethanol-adenosine
  modified_base 2: mod_base = OTHER; note = 2'-O-methyl-adenosine
  modified_base 3: mod_base = OTHER; note = 2'-Fluoro-uridine
  modified_base 4: mod_base = um
  modified_base 5: mod_base = gm
  modified_base 6: mod_base = um
  modified_base 7: mod_base = gm
  modified_base 8: mod_base = OTHER; note = 2'-O-methyl-adenosine
  modified_base 9: mod_base = cm
  misc_feature 10..12: note = linked via phosphorothioate
  modified_base 10: mod_base = um
  modified_base 11: mod_base = gm
  modified_base 12: mod_base = OTHER; note = 2'-O-methyl-adenosine
  source 1..12: mol_type = other RNA
aattgtgactga

SEQ ID NO: 560 - RNA, 12 nt, synthetic construct
  misc_feature 1^2: note = linked via phosphorothioate
  modified_base 1: mod_base = OTHER; note = hexadecanamidodiethoxymethanol-adenosine
  modified_base 2: mod_base = OTHER; note = 2'-O,4'-C-Methyleneadenosine
  modified_base 3: mod_base = OTHER; note = 2'-Fluoro-uridine
  modified_base 4: mod_base = um
  modified_base 5: mod_base = gm
  modified_base 6: mod_base = um
  modified_base 7: mod_base = gm
  modified_base 8: mod_base = OTHER; note = 2'-O-methyl-adenosine
  modified_base 9: mod_base = cm
  misc_feature 10..12: note = linked via phosphorothioate
  modified_base 10: mod_base = um
  modified_base 11: mod_base = gm
  modified_base 12: mod_base = OTHER; note = 2'-O-methyl-adenosine
  source 1..12: mol_type = other RNA
aattgtgactga

SEQ ID NO: 561 - RNA, 12 nt, synthetic construct
  misc_feature 1^2: note = linked via phosphorothioate
  modified_base 1: mod_base = OTHER; note = hexadecanamidodiethoxymethanol-adenosine
  modified_base 2: mod_base = OTHER; note = 2'-O,4'-C-Methyleneadenosine
  modified_base 3: mod_base = OTHER; note = 2'-Fluoro-uridine
  modified_base 4: mod_base = um
  modified_base 5: mod_base = gm
  modified_base 6: mod_base = um
  modified_base 7: mod_base = OTHER; note = 2'-O,4'-C-Methyleneguanosine
  modified_base 8: mod_base = OTHER; note = 2'-O-methyl-adenosine
  modified_base 9: mod_base = cm
  misc_feature 10..12: note = linked via phosphorothioate
  modified_base 10: mod_base = um
  modified_base 11: mod_base = gm
  modified_base 12: mod_base = OTHER; note = 2'-O-methyl-adenosine
  source 1..12: mol_type = other RNA
aattgtgactga

SEQ ID NO: 562 - RNA, 12 nt, synthetic construct
  misc_feature 1^2: note = linked via phosphorothioate
  modified_base 1: mod_base = OTHER; note = hexadecanamidodiethoxymethanol-adenosine
  modified_base 2: mod_base = OTHER; note = 2'-O,4'-C-Methyleneadenosine
  modified_base 3: mod_base = OTHER; note = 2'-Fluoro-uridine
  modified_base 4: mod_base = um
  modified_base 5: mod_base = gm
  modified_base 6: mod_base = um
  modified_base 7: mod_base = OTHER; note = 2'-O,4'-C-Methyleneguanosine
  modified_base 8: mod_base = OTHER; note = 2'-O,4'-C-Methyleneadenosine
  modified_base 9: mod_base = cm
  misc_feature 10..12: note = linked via phosphorothioate
  modified_base 10: mod_base = um
  modified_base 11: mod_base = gm
  modified_base 12: mod_base = OTHER; note = 2'-O-methyl-adenosine
  source 1..12: mol_type = other RNA
aattgtgactga

SEQ ID NO: 563 - DNA, 12 bp, synthetic construct
  misc_feature 1..9: note = RNA fragment
  misc_feature 10: note = DNA fragment
  misc_feature 11..12: note = RNA fragment
  misc_feature 1^2: note = linked via phosphorothioate
  modified_base 1: mod_base = OTHER; note = hexadecanamidodiethoxymethanol-adenosine
  modified_base 2: mod_base = OTHER; note = 2'-O,4'-C-Methyleneadenosine
  modified_base 3: mod_base = OTHER; note = 2'-Fluoro-uridine
  modified_base 4: mod_base = um
  modified_base 5: mod_base = gm
  modified_base 6: mod_base = um
  modified_base 7: mod_base = OTHER; note = 2'-O,4'-C-Methyleneguanosine
  modified_base 8: mod_base = OTHER; note = 2'-O,4'-C-Methyleneadenosine
  modified_base 9: mod_base = cm
  misc_feature 10..12: note = linked via phosphorothioate
  modified_base 10: mod_base = OTHER; note = 2'-O,4'-C-Methylenethymine
  modified_base 11: mod_base = gm
  modified_base 12: mod_base = OTHER; note = 2'-O-methyl-adenosine
  source 1..12: mol_type = other DNA
aattgtgactga

SEQ ID NO: 564 - DNA, 12 bp, synthetic construct
  misc_feature 1..9: note = RNA fragment
  misc_feature 10: note = DNA fragment
  misc_feature 11..12: note = RNA fragment
  misc_feature 1^2: note = linked via phosphorothioate
  modified_base 1: mod_base = OTHER; note = hexadecanamidodiethoxymethanol-adenosine
  modified_base 2: mod_base = OTHER; note = 2'-O,4'-C-Methyleneadenosine
  modified_base 3: mod_base = OTHER; note = 2'-Fluoro-uridine
  modified_base 4: mod_base = um
  modified_base 5: mod_base = gm
  modified_base 6: mod_base = um
  modified_base 7: mod_base = OTHER; note = 2'-O,4'-C-Methyleneguanosine
  modified_base 8: mod_base = OTHER; note = 2'-O,4'-C-Methyleneadenosine
  modified_base 9: mod_base = cm
  misc_feature 10..12: note = linked via phosphorothioate
  modified_base 10: mod_base = OTHER; note = 2'-O,4'-C-Methylenethymine
  modified_base 11: mod_base = OTHER; note = 2'-O,4'-C-Methyleneguanosine
  modified_base 12: mod_base = OTHER; note = 2'-O-methyl-adenosine
  source 1..12: mol_type = other DNA
aattgtgactga

SEQ ID NO: 565 - RNA, 20 nt, synthetic construct
  source 1..20: mol_type = other RNA
caattatgtttgaaagccaa

SEQ ID NO: 566 - RNA, 14 nt, synthetic construct
  source 1..14: mol_type = other RNA
tgtttgaaagccaa

SEQ ID NO: 567 - RNA, 20 nt, synthetic construct
  misc_feature 1^2: note = linked via phosphorothioate
  modified_base 1: mod_base = OTHER; note = hexadecanamidodiethoxymethanol-cytidine
  modified_base 2: mod_base = OTHER; note = 2'-O-methyl-adenosine
  modified_base 3: mod_base = OTHER; note = 2'-O-methyl-adenosine
  modified_base 4: mod_base = um
  modified_base 5: mod_base = um
  modified_base 6: mod_base = OTHER; note = 2'-O-methyl-adenosine
  modified_base 7: mod_base = um
  modified_base 8: mod_base = OTHER; note = 2'-Fluoro-guanosine
  modified_base 9: mod_base = OTHER; note = 2'-Fluoro-uridine
  modified_base 10: mod_base = OTHER; note = 2'-Fluoro-uridine
  modified_base 11: mod_base = OTHER; note = 2'-Fluoro-uridine
  modified_base 12: mod_base = gm
  modified_base 13: mod_base = OTHER; note = 2'-O-methyl-adenosine
  modified_base 14: mod_base = OTHER; note = 2'-O-methyl-adenosine
  modified_base 15: mod_base = OTHER; note = 2'-O-methyl-adenosine
  modified_base 16: mod_base = gm
  modified_base 17: mod_base = cm
  misc_feature 18..20: note = linked via phosphorothioate
  modified_base 18: mod_base = cm
  modified_base 19: mod_base = OTHER; note = 2'-O-methyl-adenosine
  modified_base 20: mod_base = OTHER; note = 2'-O-methyl-adenosine
  source 1..20: mol_type = other RNA
caattatgtttgaaagccaa

SEQ ID NO: 568 - RNA, 20 nt, synthetic construct
  misc_feature 1^2: note = linked via phosphorothioate
  modified_base 1: mod_base = OTHER; note = hexadecanamidodiethoxymethanol-cytidine
  modified_base 2: mod_base = OTHER; note = 2'-O,4'-C-Methyleneadenosine
  modified_base 3: mod_base = OTHER; note = 2'-O-methyl-adenosine
  modified_base 4: mod_base = um
  modified_base 5: mod_base = um
  modified_base 6: mod_base = OTHER; note = 2'-O-methyl-adenosine
  modified_base 7: mod_base = um
  modified_base 8: mod_base = OTHER; note = 2'-Fluoro-guanosine
  modified_base 9: mod_base = OTHER; note = 2'-Fluoro-uridine
  modified_base 10: mod_base = OTHER; note = 2'-Fluoro-uridine
  modified_base 11: mod_base = OTHER; note = 2'-Fluoro-uridine
  modified_base 12: mod_base = gm
  modified_base 13: mod_base = OTHER; note = 2'-O-methyl-adenosine
  modified_base 14: mod_base = OTHER; note = 2'-O-methyl-adenosine
  modified_base 15: mod_base = OTHER; note = 2'-O-methyl-adenosine
  modified_base 16: mod_base = gm
  modified_base 17: mod_base = cm
  misc_feature 18..20: note = linked via phosphorothioate
  modified_base 18: mod_base = cm
  modified_base 19: mod_base = OTHER; note = 2'-O-methyl-adenosine
  modified_base 20: mod_base = OTHER; note = 2'-O-methyl-adenosine
  source 1..20: mol_type = other RNA
caattatgtttgaaagccaa

SEQ ID NO: 569 - RNA, 20 nt, synthetic construct
  misc_feature 1^2: note = linked via phosphorothioate
  modified_base 1: mod_base = OTHER; note = hexadecanamidodiethoxymethanol-cytidine
  modified_base 2: mod_base = OTHER; note = 2'-O,4'-C-Methyleneadenosine
  modified_base 3: mod_base = OTHER; note = 2'-O-methyl-adenosine
  modified_base 4: mod_base = um
  modified_base 5: mod_base = um
  modified_base 6: mod_base = OTHER; note = 2'-O-methyl-adenosine
  modified_base 7: mod_base = um
  modified_base 8: mod_base = OTHER; note = 2'-Fluoro-guanosine
  modified_base 9: mod_base = OTHER; note = 2'-Fluoro-uridine
  modified_base 10: mod_base = OTHER; note = 2'-Fluoro-uridine
  modified_base 11: mod_base = OTHER; note = 2'-Fluoro-uridine
  modified_base 12: mod_base = gm
  modified_base 13: mod_base = OTHER; note = 2'-O-methyl-adenosine
  modified_base 14: mod_base = OTHER; note = 2'-O-methyl-adenosine
  modified_base 15: mod_base = OTHER; note = 2'-O,4'-C-Methyleneadenosine
  modified_base 16: mod_base = gm
  modified_base 17: mod_base = cm
  misc_feature 18..20: note = linked via phosphorothioate
  modified_base 18: mod_base = cm
  modified_base 19: mod_base = OTHER; note = 2'-O-methyl-adenosine
  modified_base 20: mod_base = OTHER; note = 2'-O-methyl-adenosine
  source 1..20: mol_type = other RNA
caattatgtttgaaagccaa

SEQ ID NO: 570 - RNA, 20 nt, synthetic construct
  misc_feature 1^2: note = linked via phosphorothioate
  modified_base 1: mod_base = OTHER; note = hexadecanamidodiethoxymethanol-cytidine
  modified_base 2: mod_base = OTHER; note = 2'-O,4'-C-Methyleneadenosine
  modified_base 3: mod_base = OTHER; note = 2'-O-methyl-adenosine
  modified_base 4: mod_base = um
  modified_base 5: mod_base = um
  modified_base 6: mod_base = OTHER; note = 2'-O-methyl-adenosine
  modified_base 7: mod_base = um
  modified_base 8: mod_base = OTHER; note = 2'-Fluoro-guanosine
  modified_base 9: mod_base = OTHER; note = 2'-Fluoro-uridine
  modified_base 10: mod_base = OTHER; note = 2'-Fluoro-uridine
  modified_base 11: mod_base = OTHER; note = 2'-Fluoro-uridine
  modified_base 12: mod_base = gm
  modified_base 13: mod_base = OTHER; note = 2'-O-methyl-adenosine
  modified_base 14: mod_base = OTHER; note = 2'-O-methyl-adenosine
  modified_base 15: mod_base = OTHER; note = 2'-O,4'-C-Methyleneadenosine
  modified_base 16: mod_base = OTHER; note = 2'-O,4'-C-Methyleneguanosine
  modified_base 17: mod_base = cm
  misc_feature 18..20: note = linked via phosphorothioate
  modified_base 18: mod_base = cm
  modified_base 19: mod_base = OTHER; note = 2'-O-methyl-adenosine
  modified_base 20: mod_base = OTHER; note = 2'-O-methyl-adenosine
  source 1..20: mol_type = other RNA
caattatgtttgaaagccaa

SEQ ID NO: 571 - RNA, 14 nt, synthetic construct
  misc_feature 1^2: note = linked via phosphorothioate
  modified_base 1: mod_base = OTHER; note = hexadecanamidodiethoxymethanol-uridine
  modified_base 2: mod_base = OTHER; note = 2'-Fluoro-guanosine
  modified_base 3: mod_base = OTHER; note = 2'-Fluoro-uridine
  modified_base 4: mod_base = OTHER; note = 2'-Fluoro-uridine
  modified_base 5: mod_base = OTHER; note = 2'-Fluoro-uridine
  modified_base 6: mod_base = gm
  modified_base 7: mod_base = OTHER; note = 2'-O-methyl-adenosine
  modified_base 8: mod_base = OTHER; note = 2'-O-methyl-adenosine
  modified_base 9: mod_base = OTHER; note = 2'-O-methyl-adenosine
  modified_base 10: mod_base = gm
  modified_base 11: mod_base = cm
  misc_feature 12..14: note = linked via phosphorothioate
  modified_base 12: mod_base = cm
  modified_base 13: mod_base = OTHER; note = 2'-O-methyl-adenosine
  modified_base 14: mod_base = OTHER; note = 2'-O-methyl-adenosine
  source 1..14: mol_type = other RNA
tgtttgaaagccaa

SEQ ID NO: 572 - RNA, 14 nt, synthetic construct
  misc_feature 1^2: note = linked via phosphorothioate
  modified_base 1: mod_base = OTHER; note = hexadecanamidodiethoxymethanol-uridine
  modified_base 2: mod_base = OTHER; note = 2'-O,4'-C-Methyleneguanosine
  modified_base 3: mod_base = OTHER; note = 2'-Fluoro-uridine
  modified_base 4: mod_base = OTHER; note = 2'-Fluoro-uridine
  modified_base 5: mod_base = OTHER; note = 2'-Fluoro-uridine
  modified_base 6: mod_base = gm
  modified_base 7: mod_base = OTHER; note = 2'-O-methyl-adenosine
  modified_base 8: mod_base = OTHER; note = 2'-O-methyl-adenosine
  modified_base 9: mod_base = OTHER; note = 2'-O-methyl-adenosine
  modified_base 10: mod_base = gm
  modified_base 11: mod_base = cm
  misc_feature 12..14: note = linked via phosphorothioate
  modified_base 12: mod_base = cm
  modified_base 13: mod_base = OTHER; note = 2'-O-methyl-adenosine
  modified_base 14: mod_base = OTHER; note = 2'-O-methyl-adenosine
  source 1..14: mol_type = other RNA
tgtttgaaagccaa

SEQ ID NO: 573 - RNA, 14 nt, synthetic construct
  misc_feature 1^2: note = linked via phosphorothioate
  modified_base 1: mod_base = OTHER; note = hexadecanamidodiethoxymethanol-uridine
  modified_base 2: mod_base = OTHER; note = 2'-O,4'-C-Methyleneguanosine
  modified_base 3: mod_base = OTHER; note = 2'-Fluoro-uridine
  modified_base 4: mod_base = OTHER; note = 2'-Fluoro-uridine
  modified_base 5: mod_base = OTHER; note = 2'-Fluoro-uridine
  modified_base 6: mod_base = gm
  modified_base 7: mod_base = OTHER; note = 2'-O-methyl-adenosine
  modified_base 8: mod_base = OTHER; note = 2'-O-methyl-adenosine
  modified_base 9: mod_base = OTHER; note = 2'-O,4'-C-Methyleneadenosine
  modified_base 10: mod_base = gm
  modified_base 11: mod_base = cm
  misc_feature 12..14: note = linked via phosphorothioate
  modified_base 12: mod_base = cm
  modified_base 13: mod_base = OTHER; note = 2'-O-methyl-adenosine
  modified_base 14: mod_base = OTHER; note = 2'-O-methyl-adenosine
  source 1..14: mol_type = other RNA
tgtttgaaagccaa

SEQ ID NO: 574 - RNA, 14 nt, synthetic construct
  misc_feature 1^2: note = linked via phosphorothioate
  modified_base 1: mod_base = OTHER; note = hexadecanamidodiethoxymethanol-uridine
  modified_base 2: mod_base = OTHER; note = 2'-O,4'-C-Methyleneguanosine
  modified_base 3: mod_base = OTHER; note = 2'-Fluoro-uridine
  modified_base 4: mod_base = OTHER; note = 2'-Fluoro-uridine
  modified_base 5: mod_base = OTHER; note = 2'-Fluoro-uridine
  modified_base 6: mod_base = gm
  modified_base 7: mod_base = OTHER; note = 2'-O-methyl-adenosine
  modified_base 8: mod_base = OTHER; note = 2'-O-methyl-adenosine
  modified_base 9: mod_base = OTHER; note = 2'-O,4'-C-Methyleneadenosine
  modified_base 10: mod_base = OTHER; note = 2'-O,4'-C-Methyleneguanosine
  modified_base 11: mod_base = cm
  misc_feature 12..14: note = linked via phosphorothioate
  modified_base 12: mod_base = cm
  modified_base 13: mod_base = OTHER; note = 2'-O-methyl-adenosine
  modified_base 14: mod_base = OTHER; note = 2'-O-methyl-adenosine
  source 1..14: mol_type = other RNA
tgtttgaaagccaa

SEQ ID NO: 575 - RNA, 14 nt, synthetic construct
  misc_feature 1^2: note = linked via phosphorothioate
  modified_base 1: mod_base = OTHER; note = hexadecanamidodiethoxymethanol-uridine
  modified_base 2: mod_base = OTHER; note = 2'-O,4'-C-Methyleneguanosine
  modified_base 3: mod_base = OTHER; note = 2'-Fluoro-uridine
  modified_base 4: mod_base = OTHER; note = 2'-Fluoro-uridine
  modified_base 5: mod_base = OTHER; note = 2'-Fluoro-uridine
  modified_base 6: mod_base = gm
  modified_base 7: mod_base = OTHER; note = 2'-O-methyl-adenosine
  modified_base 8: mod_base = OTHER; note = 2'-O-methyl-adenosine
  modified_base 9: mod_base = OTHER; note = 2'-O,4'-C-Methyleneadenosine
  modified_base 10: mod_base = OTHER; note = 2'-O,4'-C-Methyleneguanosine
  modified_base 11: mod_base = cm
  misc_feature 12..14: note = linked via phosphorothioate
  modified_base 12: mod_base = OTHER; note = 2'-O,4'-C-Methylenecytidine
  modified_base 13: mod_base = OTHER; note = 2'-O,4'-C-Methyleneadenosine
  modified_base 14: mod_base = OTHER; note = 2'-O-methyl-adenosine
  source 1..14: mol_type = other RNA
tgtttgaaagccaa

SEQ ID NO: 576 - RNA, 20 nt, synthetic construct
  misc_feature 1^2: note = linked via phosphorothioate
  modified_base 1: mod_base = cm
  modified_base 2: mod_base = OTHER; note = 2'-O-methyl-adenosine
  modified_base 3: mod_base = OTHER; note = 2'-O-methyl-adenosine
  modified_base 4: mod_base = um
  modified_base 5: mod_base = um
  modified_base 6: mod_base = OTHER; note = 2'-O-methyl-adenosine
  modified_base 7: mod_base = um
  modified_base 8: mod_base = OTHER; note = 2'-Fluoro-guanosine
  modified_base 9: mod_base = OTHER; note = 2'-Fluoro-uridine
  modified_base 10: mod_base = OTHER; note = 2'-Fluoro-uridine
  modified_base 11: mod_base = OTHER; note = 2'-Fluoro-uridine
  modified_base 12: mod_base = gm
  modified_base 13: mod_base = OTHER; note = 2'-O-methyl-adenosine
  modified_base 14: mod_base = OTHER; note = 2'-O-methyl-adenosine
  modified_base 15: mod_base = OTHER; note = 2'-O-methyl-adenosine
  modified_base 16: mod_base = gm
  modified_base 17: mod_base = cm
  misc_feature 18..20: note = linked via phosphorothioate
  modified_base 18: mod_base = cm
  modified_base 19: mod_base = OTHER; note = 2'-O-methyl-adenosine
  modified_base 20: mod_base = OTHER; note = 2'-O-methyl-adenosine
  source 1..20: mol_type = other RNA
caattatgtttgaaagccaa

SEQ ID NO: 577 - RNA, 22 nt, synthetic construct
  source 1..22: mol_type = other RNA
ttggctttcaaacataattggg

SEQ ID NO: 578 - RNA, 22 nt, synthetic construct
  misc_feature 1..4: note = linked via phosphorothioate
  modified_base 1: mod_base = OTHER; note = 4'-O-monomethylphosphonate-2'-O-methylmethyluridine
  modified_base 2: mod_base = OTHER; note = 2'-Fluoro-uridine
  modified_base 3: mod_base = OTHER; note = 2'-Fluoro-guanosine
  modified_base 4: mod_base = OTHER; note = 2'-Fluoro-guanosine
  modified_base 5: mod_base = OTHER; note = 2'-Fluoro-cytidine
  modified_base 6: mod_base = um
  modified_base 7: mod_base = OTHER; note = 2'-Fluoro-uridine
  modified_base 8: mod_base = um
  modified_base 9: mod_base = cm
  modified_base 10: mod_base = OTHER; note = 2'-Fluoro-adenosine
  modified_base 11: mod_base = OTHER; note = 2'-O-methyl-adenosine
  modified_base 12: mod_base = OTHER; note = 2'-O-methyl-adenosine
  modified_base 13: mod_base = cm
  modified_base 14: mod_base = OTHER; note = 2'-Fluoro-adenosine
  modified_base 15: mod_base = um
  modified_base 16: mod_base = OTHER; note = 2'-O-methyl-adenosine
  modified_base 17: mod_base = OTHER; note = 2'-O-methyl-adenosine
  modified_base 18: mod_base = um
  modified_base 19: mod_base = um
  misc_feature 20..22: note = linked via phosphorothioate
  modified_base 20: mod_base = gm
  modified_base 21: mod_base = gm
  modified_base 22: mod_base = gm
  source 1..22: mol_type = other RNA
ttggctttcaaacataattggg

SEQ ID NO: 579 - RNA, 22 nt, synthetic construct
  misc_feature 1..4: note = linked via phosphorothioate
  modified_base 1: mod_base = OTHER; note = 4'-O-monomethylphosphonate-2'-O-methylmethyluridine
  modified_base 2: mod_base = OTHER; note = 2'-Fluoro-uridine
  modified_base 3: mod_base = OTHER; note = 2'-Fluoro-guanosine
  modified_base 4: mod_base = OTHER; note = 2'-Fluoro-guanosine
  modified_base 5: mod_base = OTHER; note = 2'-Fluoro-cytidine
  modified_base 6: mod_base = um
  modified_base 7: mod_base = OTHER; note = 2'-Fluoro-uridine
  modified_base 8: mod_base = um
  modified_base 9: mod_base = cm
  modified_base 10: mod_base = OTHER; note = 2'-Fluoro-adenosine
  modified_base 11: mod_base = OTHER; note = 2'-O-methyl-adenosine
  modified_base 12: mod_base = OTHER; note = 2'-O-methyl-adenosine
  misc_feature 13..15: note = linked via phosphorothioate
  modified_base 13: mod_base = cm
  modified_base 14: mod_base = OTHER; note = 2'-Fluoro-adenosine
  modified_base 15: mod_base = um
  modified_base 16: mod_base = OTHER; note = 2'-O-methyl-adenosine
  modified_base 17: mod_base = OTHER; note = 2'-O-methyl-adenosine
  modified_base 18: mod_base = um
  modified_base 19: mod_base = um
  misc_feature 20..22: note = linked via phosphorothioate
  modified_base 20: mod_base = gm
  modified_base 21: mod_base = gm
  modified_base 22: mod_base = gm
  source 1..22: mol_type = other RNA
ttggctttcaaacataattggg

SEQ ID NO: 580 - RNA, 36 nt, synthetic construct
  source 1..36: mol_type = other RNA
caattatgtttgaaagccaagcagccgaaaggctgc

SEQ ID NO: 581 - RNA, 36 nt, synthetic construct; identical to SEQ ID NO: 580
  misc_feature 1^2: note = linked via phosphorothioate
  modified_base 1: mod_base = cm
  modified_base 2: mod_base = OTHER; note = 2'-O-methyl-adenosine
  modified_base 3: mod_base = OTHER; note = 2'-O-methyl-adenosine
  modified_base 4: mod_base = um
  modified_base 5: mod_base = um
  modified_base 6: mod_base = OTHER; note = 2'-O-methyl-adenosine
  modified_base 7: mod_base = um
  modified_base 8: mod_base = OTHER; note = 2'-Fluoro-guanosine
  modified_base 9: mod_base = OTHER; note = 2'-Fluoro-uridine
  modified_base 10: mod_base = OTHER; note = 2'-Fluoro-uridine
  modified_base 11: mod_base = OTHER; note = 2'-Fluoro-uridine
  modified_base 12: mod_base = gm
  modified_base 13: mod_base = OTHER; note = 2'-O-methyl-adenosine
  modified_base 14: mod_base = OTHER; note = 2'-O-methyl-adenosine
  modified_base 15: mod_base = OTHER; note = 2'-O-methyl-adenosine
  modified_base 16: mod_base = gm
  modified_base 17: mod_base = cm
  modified_base 18: mod_base = cm
  modified_base 19: mod_base = OTHER; note = 2'-O-methyl-adenosine
  modified_base 20: mod_base = OTHER; note = 2'-O-methyl-adenosine
  modified_base 21: mod_base = gm
  modified_base 22: mod_base = cm
  modified_base 23: mod_base = OTHER; note = 2'-O-methyl-adenosine
  modified_base 24: mod_base = gm
  modified_base 25: mod_base = cm
  modified_base 26: mod_base = cm
  modified_base 27: mod_base = gm
  modified_base 28: mod_base = OTHER; note = hexadecanamidodiethoxymethanol-adenosine
  modified_base 29: mod_base = OTHER; note = 2'-O-methyl-adenosine
  modified_base 30: mod_base = OTHER; note = 2'-O-methyl-adenosine
  modified_base 31: mod_base = gm
  modified_base 32: mod_base = gm
  modified_base 33: mod_base = cm
  modified_base 34: mod_base = um
  modified_base 35: mod_base = gm
  modified_base 36: mod_base = cm
  source 1..36: mol_type = other RNA

SEQ ID NO: 582 - RNA, 36 nt, synthetic construct
  source 1..36: mol_type = other RNA
aggatctactcaacgttaaagcagccgaaaggctgc

SEQ ID NO: 583 - RNA, 20 nt, synthetic construct
  source 1..20: mol_type = other RNA
aggatctactcaacgttaaa

SEQ ID NO: 584 - RNA, 14 nt, synthetic construct
  source 1..14: mol_type = other RNA
tactcaacgttaaa

SEQ ID NO: 585 - RNA, 36 nt, synthetic construct; identical to SEQ ID NO: 582
  misc_feature 1^2: note = linked via phosphorothioate
  modified_base 1: mod_base = OTHER; note = 2'-O-methyl-adenosine
  modified_base 2: mod_base = gm
  modified_base 3: mod_base = gm
  modified_base 4: mod_base = OTHER; note = 2'-O-methyl-adenosine
  modified_base 5: mod_base = um
  modified_base 6: mod_base = cm
  modified_base 7: mod_base = um
  modified_base 8: mod_base = OTHER; note = 2'-Fluoro-adenosine
  modified_base 9: mod_base = OTHER; note = 2'-Fluoro-cytidine
  modified_base 10: mod_base = OTHER; note = 2'-Fluoro-uridine
  modified_base 11: mod_base = OTHER; note = 2'-Fluoro-cytidine
  modified_base 12: mod_base = OTHER; note = 2'-O-methyl-adenosine
  modified_base 13: mod_base = OTHER; note = 2'-O-methyl-adenosine
  modified_base 14: mod_base = cm
  modified_base 15: mod_base = gm
  modified_base 16: mod_base = um
  modified_base 17: mod_base = um
  modified_base 18: mod_base = OTHER; note = 2'-O-methyl-adenosine
  modified_base 19: mod_base = OTHER; note = 2'-O-methyl-adenosine
  modified_base 20: mod_base = OTHER; note = 2'-O-methyl-adenosine
  modified_base 21: mod_base = gm
  modified_base 22: mod_base = cm
  modified_base 23: mod_base = OTHER; note = 2'-O-methyl-adenosine
  modified_base 24: mod_base = gm
  modified_base 25: mod_base = cm
  modified_base 26: mod_base = cm
  modified_base 27: mod_base = gm
  modified_base 28: mod_base = OTHER; note = hexadecanamidodiethoxymethanol-adenosine
  modified_base 29: mod_base = OTHER; note = 2'-O-methyl-adenosine
  modified_base 30: mod_base = OTHER; note = 2'-O-methyl-adenosine
  modified_base 31: mod_base = gm
  modified_base 32: mod_base = gm
  modified_base 33: mod_base = cm
  modified_base 34: mod_base = um
  modified_base 35: mod_base = gm
  modified_base 36: mod_base = cm
  source 1..36: mol_type = other RNA

SEQ ID NO: 586 - RNA, 20 nt, synthetic construct
  misc_feature 1^2: note = linked via phosphorothioate
  modified_base 1: mod_base = OTHER; note = hexadecanamidodiethoxymethanol-adenosine
  modified_base 2: mod_base = gm
  modified_base 3: mod_base = gm
  modified_base 4: mod_base = OTHER; note = 2'-O-methyl-adenosine
  modified_base 5: mod_base = um
  modified_base 6: mod_base = cm
  modified_base 7: mod_base = um
  modified_base 8: mod_base = OTHER; note = 2'-Fluoro-adenosine
  modified_base 9: mod_base = OTHER; note = 2'-Fluoro-cytidine
  modified_base 10: mod_base = OTHER; note = 2'-Fluoro-uridine
  modified_base 11: mod_base = OTHER; note = 2'-Fluoro-cytidine
  modified_base 12: mod_base = OTHER; note = 2'-O-methyl-adenosine
  modified_base 13: mod_base = OTHER; note = 2'-O-methyl-adenosine
  modified_base 14: mod_base = cm
  modified_base 15: mod_base = gm
  modified_base 16: mod_base = um
  modified_base 17: mod_base = um
  misc_feature 18..20: note = linked via phosphorothioate
  modified_base 18: mod_base = OTHER; note = 2'-O-methyl-adenosine
  modified_base 19: mod_base = OTHER; note = 2'-O-methyl-adenosine
  modified_base 20: mod_base = OTHER; note = 2'-O-methyl-adenosine
  source 1..20: mol_type = other RNA
aggatctactcaacgttaaa

SEQ ID NO: 587 - RNA, 20 nt, synthetic construct
  misc_feature 1^2: note = linked via phosphorothioate
  modified_base 1: mod_base = OTHER; note = hexadecanamidodiethoxymethanol-adenosine
  modified_base 2: mod_base = OTHER; note = 2'-O,4'-C-Methyleneguanosine
  modified_base 3: mod_base = gm
  modified_base 4: mod_base = OTHER; note = 2'-O-methyl-adenosine
  modified_base 5: mod_base = um
  modified_base 6: mod_base = cm
  modified_base 7: mod_base = um
  modified_base 8: mod_base = OTHER; note = 2'-Fluoro-adenosine
  modified_base 9: mod_base = OTHER; note = 2'-Fluoro-cytidine
  modified_base 10: mod_base = OTHER; note = 2'-Fluoro-uridine
  modified_base 11: mod_base = OTHER; note = 2'-Fluoro-cytidine
  modified_base 12: mod_base = OTHER; note = 2'-O-methyl-adenosine
  modified_base 13: mod_base = OTHER; note = 2'-O-methyl-adenosine
  modified_base 14: mod_base = cm
  modified_base 15: mod_base = gm
  modified_base 16: mod_base = um
  modified_base 17: mod_base = um
  misc_feature 18..20: note = linked via phosphorothioate
  modified_base 18: mod_base = OTHER; note = 2'-O-methyl-adenosine
  modified_base 19: mod_base = OTHER; note = 2'-O-methyl-adenosine
  modified_base 20: mod_base = OTHER; note = 2'-O-methyl-adenosine
  source 1..20: mol_type = other RNA
aggatctactcaacgttaaa

SEQ ID NO: 588 - RNA, 20 nt, synthetic construct
  misc_feature 1^2: note = linked via phosphorothioate
  modified_base 1: mod_base = OTHER; note = hexadecanamidodiethoxymethanol-adenosine
  modified_base 2: mod_base = OTHER; note = 2'-O,4'-C-Methyleneguanosine
  modified_base 3: mod_base = gm
  modified_base 4: mod_base = OTHER; note = 2'-O-methyl-adenosine
  modified_base 5: mod_base = um
  modified_base 6: mod_base = cm
  modified_base 7: mod_base = um
  modified_base 8: mod_base = OTHER; note = 2'-Fluoro-adenosine
  modified_base 9: mod_base = OTHER; note = 2'-Fluoro-cytidine
  modified_base 10: mod_base = OTHER; note = 2'-Fluoro-uridine
  modified_base 11: mod_base = OTHER; note = 2'-Fluoro-cytidine
  modified_base 12: mod_base = OTHER; note = 2'-O-methyl-adenosine
  modified_base 13: mod_base = OTHER; note = 2'-O-methyl-adenosine
  modified_base 14: mod_base = cm
  modified_base 15: mod_base = OTHER; note = 2'-O,4'-C-Methyleneguanosine
  modified_base 16: mod_base = um
  modified_base 17: mod_base = um
  misc_feature 18..20: note = linked via phosphorothioate
  modified_base 18: mod_base = OTHER; note = 2'-O-methyl-adenosine
  modified_base 19: mod_base = OTHER; note = 2'-O-methyl-adenosine
  modified_base 20: mod_base = OTHER; note = 2'-O-methyl-adenosine
  source 1..20: mol_type = other RNA
aggatctactcaacgttaaa

SEQ ID NO: 589 - DNA, 20 bp, synthetic construct
  misc_feature 1..15: note = RNA fragment
  misc_feature 16: note = DNA fragment
  misc_feature 17..20: note = RNA fragment
  misc_feature 1^2: note = linked via phosphorothioate
  modified_base 1: mod_base = OTHER; note = hexadecanamidodiethoxymethanol-adenosine
  modified_base 2: mod_base = OTHER; note = 2'-O,4'-C-Methyleneguanosine
  modified_base 3: mod_base = gm
  modified_base 4: mod_base = OTHER; note = 2'-O-methyl-adenosine
  modified_base 5: mod_base = um
  modified_base 6: mod_base = cm
  modified_base 7: mod_base = um
  modified_base 8: mod_base = OTHER; note = 2'-Fluoro-adenosine
  modified_base 9: mod_base = OTHER; note = 2'-Fluoro-cytidine
  modified_base 10: mod_base = OTHER; note = 2'-Fluoro-uridine
  modified_base 11: mod_base = OTHER; note = 2'-Fluoro-cytidine
  modified_base 12: mod_base = OTHER; note = 2'-O-methyl-adenosine
  modified_base 13: mod_base = OTHER; note = 2'-O-methyl-adenosine
  modified_base 14: mod_base = cm
  modified_base 15: mod_base = OTHER; note = 2'-O,4'-C-Methyleneguanosine
  modified_base 16: mod_base = OTHER; note = 2'-O,4'-C-Methylenethymine
  modified_base 17: mod_base = um
  misc_feature 18..20: note = linked via phosphorothioate
  modified_base 18: mod_base = OTHER; note = 2'-O-methyl-adenosine
  modified_base 19: mod_base = OTHER; note = 2'-O-methyl-adenosine
  modified_base 20: mod_base = OTHER; note = 2'-O-methyl-adenosine
  source 1..20: mol_type = other DNA
aggatctactcaacgttaaa

SEQ ID NO: 590 - RNA, 14 nt, synthetic construct
  misc_feature 1^2: note = linked via phosphorothioate
  modified_base 1: mod_base = OTHER; note = hexadecanamidodiethoxymethanol-uridine
  modified_base 2: mod_base = OTHER; note = 2'-Fluoro-adenosine
  modified_base 3: mod_base = OTHER; note = 2'-Fluoro-cytidine
  modified_base 4: mod_base = OTHER; note = 2'-Fluoro-uridine
  modified_base 5: mod_base = OTHER; note = 2'-Fluoro-cytidine
  modified_base 6: mod_base = OTHER; note = 2'-O-methyl-adenosine
  modified_base 7: mod_base = OTHER; note = 2'-O-methyl-adenosine
  modified_base 8: mod_base = cm
  modified_base 9: mod_base = gm
  modified_base 10: mod_base = um
  modified_base 11: mod_base = um
  misc_feature 12..14: note = linked via phosphorothioate
  modified_base 12: mod_base = OTHER; note = 2'-O-methyl-adenosine
  modified_base 13: mod_base = OTHER; note = 2'-O-methyl-adenosine
  modified_base 14: mod_base = OTHER; note = 2'-O-methyl-adenosine
  source 1..14: mol_type = other RNA
tactcaacgttaaa

SEQ ID NO: 591 - RNA, 14 nt, synthetic construct
  misc_feature 1^2: note = linked via phosphorothioate
  modified_base 1: mod_base = OTHER; note = hexadecanamidodiethoxymethanol-uridine
  modified_base 2: mod_base = OTHER; note = 2'-O,4'-C-Methyleneadenosine
  modified_base 3: mod_base = OTHER; note = 2'-Fluoro-cytidine
  modified_base 4: mod_base = OTHER; note = 2'-Fluoro-uridine
  modified_base 5: mod_base = OTHER; note = 2'-Fluoro-cytidine
  modified_base 6: mod_base = OTHER; note = 2'-O-methyl-adenosine
  modified_base 7: mod_base = OTHER; note = 2'-O-methyl-adenosine
  modified_base 8: mod_base = cm
  modified_base 9: mod_base = gm
  modified_base 10: mod_base = um
  modified_base 11: mod_base = um
  misc_feature 12..14: note = linked via phosphorothioate
  modified_base 12: mod_base = OTHER; note = 2'-O-methyl-adenosine
  modified_base 13: mod_base = OTHER; note = 2'-O-methyl-adenosine
  modified_base 14: mod_base = OTHER; note = 2'-O-methyl-adenosine
  source 1..14: mol_type = other RNA
tactcaacgttaaa

SEQ ID NO: 592 - RNA, 14 nt, synthetic construct
  misc_feature 1^2: note = linked via phosphorothioate
  modified_base 1: mod_base = OTHER; note = hexadecanamidodiethoxymethanol-uridine
  modified_base 2: mod_base = OTHER; note = 2'-O,4'-C-Methyleneadenosine
  modified_base 3: mod_base = OTHER; note = 2'-Fluoro-cytidine
  modified_base 4: mod_base = OTHER; note = 2'-Fluoro-uridine
  modified_base 5: mod_base = OTHER; note = 2'-Fluoro-cytidine
  modified_base 6: mod_base = OTHER; note = 2'-O-methyl-adenosine
  modified_base 7: mod_base = OTHER; note = 2'-O-methyl-adenosine
  modified_base 8: mod_base = cm
  modified_base 9: mod_base = OTHER; note = 2'-O,4'-C-Methyleneguanosine
  modified_base 10: mod_base = um
  modified_base 11: mod_base = um
  misc_feature 12..14: note = linked via phosphorothioate
  modified_base 12: mod_base = OTHER; note = 2'-O-methyl-adenosine
  modified_base 13: mod_base = OTHER; note = 2'-O-methyl-adenosine
  modified_base 14: mod_base = OTHER; note = 2'-O-methyl-adenosine
  source 1..14: mol_type = other RNA
tactcaacgttaaa

SEQ ID NO: 593 - DNA, 14 bp, synthetic construct
  misc_feature 1..9: note = RNA fragment
  misc_feature 10: note = DNA fragment
  misc_feature 11..14: note = RNA fragment
  misc_feature 1^2: note = linked via phosphorothioate
  modified_base 1: mod_base = OTHER; note = hexadecanamidodiethoxymethanol-uridine
  modified_base 2: mod_base = OTHER; note = 2'-O,4'-C-Methyleneadenosine
  modified_base 3: mod_base = OTHER; note = 2'-Fluoro-cytidine
  modified_base 4: mod_base = OTHER; note = 2'-Fluoro-uridine
  modified_base 5: mod_base = OTHER; note = 2'-Fluoro-cytidine
  modified_base 6: mod_base = OTHER; note = 2'-O-methyl-adenosine
  modified_base 7: mod_base = OTHER; note = 2'-O-methyl-adenosine
  modified_base 8: mod_base = cm
  modified_base 9: mod_base = OTHER; note = 2'-O,4'-C-Methyleneguanosine
  modified_base 10: mod_base = OTHER; note = 2'-O,4'-C-Methylenethymine
  modified_base 11: mod_base = um
  misc_feature 12..14: note = linked via phosphorothioate
  modified_base 12: mod_base = OTHER; note = 2'-O-methyl-adenosine
  modified_base 13: mod_base = OTHER; note = 2'-O-methyl-adenosine
  modified_base 14: mod_base = OTHER; note = 2'-O-methyl-adenosine
  source 1..14: mol_type = other DNA
tactcaacgttaaa

SEQ ID NO: 594 - DNA, 14 bp, synthetic construct
  misc_feature 1..9: note = RNA fragment
  misc_feature 10: note = DNA fragment
  misc_feature 11..14: note = RNA fragment
  misc_feature 1^2: note = linked via phosphorothioate
  modified_base 1: mod_base = OTHER; note = hexadecanamidodiethoxymethanol-uridine
  modified_base 2: mod_base = OTHER; note = 2'-O,4'-C-Methyleneadenosine
  modified_base 3: mod_base = OTHER; note = 2'-Fluoro-cytidine
  modified_base 4: mod_base = OTHER; note = 2'-Fluoro-uridine
  modified_base 5: mod_base = OTHER; note = 2'-Fluoro-cytidine
  modified_base 6: mod_base = OTHER; note = 2'-O-methyl-adenosine
  modified_base 7: mod_base = OTHER; note = 2'-O-methyl-adenosine
  modified_base 8: mod_base = cm
  modified_base 9: mod_base = OTHER; note = 2'-O,4'-C-Methyleneguanosine
  modified_base 10: mod_base = OTHER; note = 2'-O,4'-C-Methylenethymine
  modified_base 11: mod_base = um
  misc_feature 12..14: note = linked via phosphorothioate
  modified_base 12: mod_base = OTHER; note = 2'-O,4'-C-Methyleneadenosine
  modified_base 13: mod_base = OTHER; note = 2'-O,4'-C-Methyleneadenosine
  modified_base 14: mod_base = OTHER; note = 2'-O-methyl-adenosine
  source 1..14: mol_type = other DNA
tactcaacgttaaa

SEQ ID NO: 595 - RNA, 20 nt, synthetic construct
  misc_feature 1^2: note = linked via phosphorothioate
  modified_base 1: mod_base = OTHER; note = 2'-O-methyl-adenosine
  modified_base 2: mod_base = gm
  modified_base 3: mod_base = gm
  modified_base 4: mod_base = OTHER; note = 2'-O-methyl-adenosine
  modified_base 5: mod_base = um
  modified_base 6: mod_base = cm
  modified_base 7: mod_base = um
  modified_base 8: mod_base = OTHER; note = 2'-Fluoro-adenosine
  modified_base 9: mod_base = OTHER; note = 2'-Fluoro-cytidine
  modified_base 10: mod_base = OTHER; note = 2'-Fluoro-uridine
  modified_base 11: mod_base = OTHER; note = 2'-Fluoro-cytidine
  modified_base 12: mod_base = OTHER; note = 2'-O-methyl-adenosine
  modified_base 13: mod_base = OTHER; note = 2'-O-methyl-adenosine
  modified_base 14: mod_base = cm
  modified_base 15: mod_base = gm
  modified_base 16: mod_base = um
  modified_base 17: mod_base = um
  misc_feature 18..20: note = linked via phosphorothioate
  modified_base 18: mod_base = OTHER; note = 2'-O-methyl-adenosine
  modified_base 19: mod_base = OTHER; note = 2'-O-methyl-adenosine
  modified_base 20: mod_base = OTHER; note = 2'-O-methyl-adenosine
  source 1..20: mol_type = other RNA
aggatctactcaacgttaaa

SEQ ID NO: 596 - RNA, 22 nt, synthetic construct
  source 1..22: mol_type = other RNA
tttaacgttgagtagatcctgg

SEQ ID NO: 597 - RNA, 22 nt, synthetic construct
  misc_feature 1..4: note = linked via phosphorothioate
  modified_base 1: mod_base = OTHER; note = 4'-O-monomethylphosphonate-2'-O-methylmethyluridine
  modified_base 2: mod_base = OTHER; note = 2'-Fluoro-uridine
  modified_base 3: mod_base = OTHER; note = 2'-Fluoro-uridine
  modified_base 4: mod_base = OTHER; note = 2'-Fluoro-adenosine
  modified_base 5: mod_base = OTHER; note = 2'-Fluoro-adenosine
  modified_base 6: mod_base = cm
  modified_base 7: mod_base = OTHER; note = 2'-Fluoro-guanosine
  modified_base 8: mod_base = um
  modified_base 9: mod_base = um
  modified_base 10: mod_base = OTHER; note = 2'-Fluoro-guanosine
  modified_base 11: mod_base = OTHER; note = 2'-O-methyl-adenosine
  modified_base 12: mod_base = gm
  modified_base 13: mod_base = um
  modified_base 14: mod_base = OTHER; note = 2'-Fluoro-adenosine
  modified_base 15: mod_base = gm
  modified_base 16: mod_base = OTHER; note = 2'-O-methyl-adenosine
  modified_base 17: mod_base = um
  modified_base 18: mod_base = cm
  modified_base 19: mod_base = cm
  misc_feature 20..22: note = linked via phosphorothioate
  modified_base 20: mod_base = um
  modified_base 21: mod_base = gm
  modified_base 22: mod_base = gm
  source 1..22: mol_type = other RNA
tttaacgttgagtagatcctgg

SEQ ID NO: 598 - RNA, 22 nt, synthetic construct
  misc_feature 1..4: note = linked via phosphorothioate
  modified_base 1: mod_base = OTHER; note = 4'-O-monomethylphosphonate-2'-O-methylmethyluridine
  modified_base 2: mod_base = OTHER; note = 2'-Fluoro-uridine
  modified_base 3: mod_base = OTHER; note = 2'-Fluoro-uridine
  modified_base 4: mod_base = OTHER; note = 2'-Fluoro-adenosine
  modified_base 5: mod_base = OTHER; note = 2'-Fluoro-adenosine
  modified_base 6: mod_base = cm
  modified_base 7: mod_base = OTHER; note = 2'-Fluoro-guanosine
  modified_base 8: mod_base = um
  modified_base 9: mod_base = um
  modified_base 10: mod_base = OTHER; note = 2'-Fluoro-guanosine
  modified_base 11: mod_base = OTHER; note = 2'-O-methyl-adenosine
  modified_base 12: mod_base = gm
  misc_feature 13..15: note = linked via phosphorothioate
  modified_base 13: mod_base = um
  modified_base 14: mod_base = OTHER; note = 2'-Fluoro-adenosine
  modified_base 15: mod_base = gm
  modified_base 16: mod_base = OTHER; note = 2'-O-methyl-adenosine
  modified_base 17: mod_base = um
  modified_base 18: mod_base = cm
  modified_base 19: mod_base = cm
  misc_feature 20..22: note = linked via phosphorothioate
  modified_base 20: mod_base = um
  modified_base 21: mod_base = gm
  modified_base 22: mod_base = gm
  source 1..22: mol_type = other RNA
tttaacgttgagtagatcctgg

SEQ ID NO: 599 - RNA, 20 nt, synthetic construct
  misc_feature 1^2: note = linked via phosphorothioate
  modified_base 1: mod_base = OTHER; note = 2'-O-methyl-adenosine
  modified_base 2: mod_base = OTHER; note = hexadecanamidodiethoxymethanol-guanosine
  modified_base 3: mod_base = um
  modified_base 4: mod_base = gm
  modified_base 5: mod_base = um
  modified_base 6: mod_base = gm
  modified_base 7: mod_base = OTHER; note = 2'-O-methyl-adenosine
  modified_base 8: mod_base = OTHER; note = 2'-Fluoro-guanosine
  modified_base 9: mod_base = OTHER; note = 2'-Fluoro-adenosine
  modified_base 10: mod_base = OTHER; note = 2'-Fluoro-adenosine
  modified_base 11: mod_base = OTHER; note = 2'-Fluoro-uridine
  modified_base 12: mod_base = um
  modified_base 13: mod_base = gm
  modified_base 14: mod_base = um
  modified_base 15: mod_base = gm
  modified_base 16: mod_base = OTHER; note = 2'-O-methyl-adenosine
  modified_base 17: mod_base = cm
  misc_feature 18..20: note = linked via phosphorothioate
  modified_base 18: mod_base = um
  modified_base 19: mod_base = gm
  modified_base 20: mod_base = OTHER; note = 2'-O-methyl-adenosine
  source 1..20: mol_type = other RNA
agtgtgagaattgtgactga

SEQ ID NO: 600 - RNA, 20 nt, synthetic construct
  misc_feature 1^2: note = linked via phosphorothioate
  modified_base 1: mod_base = OTHER; note = 2'-O-methyl-adenosine
  modified_base 2: mod_base = gm
  modified_base 3: mod_base = OTHER; note = hexadecanamidodiethoxymethanol-uridine
  modified_base 4: mod_base = gm
  modified_base 5: mod_base = um
  modified_base 6: mod_base = gm
  modified_base 7: mod_base = OTHER; note = 2'-O-methyl-adenosine
  modified_base 8: mod_base = OTHER; note = 2'-Fluoro-guanosine
  modified_base 9: mod_base = OTHER; note = 2'-Fluoro-adenosine
  modified_base 10: mod_base = OTHER; note = 2'-Fluoro-adenosine
  modified_base 11: mod_base = OTHER; note = 2'-Fluoro-uridine
  modified_base 12: mod_base = um
  modified_base 13: mod_base = gm
  modified_base 14: mod_base = um
  modified_base 15: mod_base = gm
  modified_base 16: mod_base = OTHER; note = 2'-O-methyl-adenosine
  modified_base 17: mod_base = cm
  misc_feature 18..20: note = linked via phosphorothioate
  modified_base 18: mod_base = um
  modified_base 19: mod_base = gm
  modified_base 20: mod_base = OTHER; note = 2'-O-methyl-adenosine
  source 1..20: mol_type = other RNA
agtgtgagaattgtgactga

SEQ ID NO: 601 - RNA, 20 nt, synthetic construct
  misc_feature 1^2: note = linked via phosphorothioate
  modified_base 1: mod_base = OTHER; note = 2'-O-methyl-adenosine
  modified_base 2: mod_base = gm
  modified_base 3: mod_base = um
  modified_base 4: mod_base = OTHER; note = hexadecanamidodiethoxymethanol-guanosine
  modified_base 5: mod_base = um
  modified_base 6: mod_base = gm
  modified_base 7: mod_base = OTHER; note = 2'-O-methyl-adenosine
  modified_base 8: mod_base = OTHER; note = 2'-Fluoro-guanosine
  modified_base 9: mod_base = OTHER; note = 2'-Fluoro-adenosine
  modified_base 10: mod_base = OTHER; note = 2'-Fluoro-adenosine
  modified_base 11: mod_base = OTHER; note = 2'-Fluoro-uridine
  modified_base 12: mod_base = um
  modified_base 13: mod_base = gm
  modified_base 14: mod_base = um
  modified_base 15: mod_base = gm
  modified_base 16: mod_base = OTHER; note = 2'-O-methyl-adenosine
  modified_base 17: mod_base = cm
  misc_feature 18..20: note = linked via phosphorothioate
  modified_base 18: mod_base = um
  modified_base 19: mod_base = gm
  modified_base 20: mod_base = OTHER; note = 2'-O-methyl-adenosine
  source 1..20: mol_type = other RNA
agtgtgagaattgtgactga

SEQ ID NO: 602 - RNA, 20 nt, synthetic construct
  misc_feature 1^2: note = linked via phosphorothioate
  modified_base 1: mod_base = OTHER; note = 2'-O-methyl-adenosine
  modified_base 2: mod_base = gm
  modified_base 3: mod_base = um
  modified_base 4: mod_base = gm
  modified_base 5: mod_base = OTHER; note = hexadecanamidodiethoxymethanol-uridine
  modified_base 6: mod_base = gm
  modified_base 7: mod_base = OTHER; note = 2'-O-methyl-adenosine
  modified_base 8: mod_base = OTHER; note = 2'-Fluoro-guanosine
  modified_base 9: mod_base = OTHER; note = 2'-Fluoro-adenosine
  modified_base 10: mod_base = OTHER; note = 2'-Fluoro-adenosine
  modified_base 11: mod_base = OTHER; note = 2'-Fluoro-uridine
  modified_base 12: mod_base = um
  modified_base 13: mod_base = gm
  modified_base 14: mod_base = um
  modified_base 15: mod_base = gm
  modified_base 16: mod_base = OTHER; note = 2'-O-methyl-adenosine
  modified_base 17: mod_base = cm
  misc_feature 18..20: note = linked via phosphorothioate
  modified_base 18: mod_base = um
  modified_base 19: mod_base = gm
  modified_base 20: mod_base = OTHER; note = 2'-O-methyl-adenosine
  source 1..20: mol_type = other RNA
agtgtgagaattgtgactga

SEQ ID NO: 603 - RNA, 20 nt, synthetic construct
  misc_feature 1^2: note = linked via phosphorothioate
  modified_base 1: mod_base = OTHER; note = 2'-O-methyl-adenosine
  modified_base 2: mod_base = gm
  modified_base 3: mod_base = um
  modified_base 4: mod_base = gm
  modified_base 5: mod_base = um
  modified_base 6: mod_base = OTHER; note = hexadecanamidodiethoxymethanol-guanosine
  modified_base 7: mod_base = OTHER; note = 2'-O-methyl-adenosine
  modified_base 8: mod_base = OTHER; note = 2'-Fluoro-guanosine
  modified_base 9: mod_base = OTHER; note = 2'-Fluoro-adenosine
  modified_base 10: mod_base = OTHER; note = 2'-Fluoro-adenosine
  modified_base 11: mod_base = OTHER; note = 2'-Fluoro-uridine
  modified_base 12: mod_base = um
  modified_base 13: mod_base = gm
  modified_base 14: mod_base = um
  modified_base 15: mod_base = gm
  modified_base 16: mod_base = OTHER; note = 2'-O-methyl-adenosine
  modified_base 17: mod_base = cm
  misc_feature 18..20: note = linked via phosphorothioate
  modified_base 18: mod_base = um
  modified_base 19: mod_base = gm
  modified_base 20: mod_base = OTHER; note = 2'-O-methyl-adenosine
  source 1..20: mol_type = other RNA
agtgtgagaattgtgactga

SEQ ID NO: 604 - RNA, 20 nt, synthetic construct
  misc_feature 1^2: note = linked via phosphorothioate
  modified_base 1: mod_base = OTHER; note = 2'-O-methyl-adenosine
  modified_base 2: mod_base = gm
  modified_base 3: mod_base = um
  modified_base 4: mod_base = gm
  modified_base 5: mod_base = um
  modified_base 6: mod_base = gm
  modified_base 7: mod_base = OTHER; note = hexadecanamidodiethoxymethanol-adenosine
  modified_base 8: mod_base = OTHER; note = 2'-Fluoro-guanosine
  modified_base 9: mod_base = OTHER; note = 2'-Fluoro-adenosine
  modified_base 10: mod_base = OTHER; note = 2'-Fluoro-adenosine
  modified_base 11: mod_base = OTHER; note = 2'-Fluoro-uridine
  modified_base 12: mod_base = um
  modified_base 13: mod_base = gm
  modified_base 14: mod_base = um
  modified_base 15: mod_base = gm
  modified_base 16: mod_base = OTHER; note = 2'-O-methyl-adenosine
  modified_base 17: mod_base = cm
  misc_feature 18..20: note = linked via phosphorothioate
  modified_base 18: mod_base = um
  modified_base 19: mod_base = gm
  modified_base 20: mod_base = OTHER; note = 2'-O-methyl-adenosine
  source 1..20: mol_type = other RNA
agtgtgagaattgtgactga

SEQ ID NO: 605 - RNA, 20 nt, synthetic construct
  misc_feature 1^2: note = linked via phosphorothioate
  modified_base 1: mod_base = OTHER; note = 2'-O-methyl-adenosine
  modified_base 2: mod_base = gm
  modified_base 3: mod_base = um
  modified_base 4: mod_base = gm
  modified_base 5: mod_base = um
  modified_base 6: mod_base = gm
  modified_base 7: mod_base = OTHER; note = 2'-O-methyl-adenosine
  modified_base 8: mod_base = OTHER; note = hexadecanamidodiethoxymethanol-guanosine
  modified_base 9: mod_base = OTHER; note = 2'-Fluoro-adenosine
  modified_base 10: mod_base = OTHER; note = 2'-Fluoro-adenosine
  modified_base 11: mod_base = OTHER; note = 2'-Fluoro-uridine
  modified_base 12: mod_base = um
  modified_base 13: mod_base = gm
  modified_base 14: mod_base = um
  modified_base 15: mod_base = gm
  modified_base 16: mod_base = OTHER; note = 2'-O-methyl-adenosine
  modified_base 17: mod_base = cm
  misc_feature 18..20: note = linked via phosphorothioate
  modified_base 18: mod_base = um
  modified_base 19: mod_base = gm
  modified_base 20: mod_base = OTHER; note = 2'-O-methyl-adenosine
  source 1..20: mol_type = other RNA
agtgtgagaattgtgactga

SEQ ID NO: 606 - RNA, 20 nt, synthetic construct
  misc_feature 1^2: note = linked via phosphorothioate
  modified_base 1: mod_base = OTHER; note = 2'-O-methyl-adenosine
  modified_base 2: mod_base = gm
  modified_base 3: mod_base = um
  modified_base 4: mod_base = gm
  modified_base 5: mod_base = um
  modified_base 6: mod_base = gm
  modified_base 7: mod_base = OTHER; note = 2'-O-methyl-adenosine
  modified_base 8: mod_base = gm
  modified_base 9: mod_base = OTHER; note = hexadecanamidodiethoxymethanol-adenosine
  modified_base 10: mod_base = OTHER; note = 2'-Fluoro-adenosine
  modified_base 11: mod_base = OTHER; note = 2'-Fluoro-uridine
  modified_base 12: mod_base = um
  modified_base 13: mod_base = gm
  modified_base 14: mod_base = um
  modified_base 15: mod_base = gm
  modified_base 16: mod_base = OTHER; note = 2'-O-methyl-adenosine
  modified_base 17: mod_base = cm
  misc_feature 18..20: note = linked via phosphorothioate
  modified_base 18: mod_base = um
  modified_base 19: mod_base = gm
  modified_base 20: mod_base = OTHER; note = 2'-O-methyl-adenosine
  source 1..20: mol_type = other RNA
agtgtgagaattgtgactga

SEQ ID NO: 607 - RNA, 16 nt, synthetic construct
  misc_feature 1^2: note = linked via phosphorothioate
  modified_base 1: mod_base = um
  modified_base 2: mod_base = OTHER; note = hexadecanamidodiethoxymethanol-guanosine
  modified_base 3: mod_base = OTHER; note = 2'-O-methyl-adenosine
  modified_base 4: mod_base = OTHER; note = 2'-Fluoro-guanosine
  modified_base 5: mod_base = OTHER; note = 2'-Fluoro-adenosine
  modified_base 6: mod_base = OTHER; note = 2'-Fluoro-adenosine
  modified_base 7: mod_base = OTHER; note = 2'-Fluoro-uridine
  modified_base 8: mod_base = um
  modified_base 9: mod_base = gm
  modified_base 10: mod_base = um
  modified_base 11: mod_base = gm
  modified_base 12: mod_base = OTHER; note = 2'-O-methyl-adenosine
  modified_base 13: mod_base = cm
  misc_feature 14..16: note = linked via phosphorothioate
  modified_base 14: mod_base = um
  modified_base 15: mod_base = gm
  modified_base 16: mod_base = OTHER; note = 2'-O-methyl-adenosine
  source 1..16: mol_type = other RNA
tgagaattgtgactga

SEQ ID NO: 608 - RNA, 16 nt, synthetic construct
  misc_feature 1^2: note = linked via phosphorothioate
  modified_base 1: mod_base = um
  modified_base 2: mod_base = gm
  modified_base 3: mod_base = OTHER; note = hexadecanamidodiethoxymethanol-adenosine
  modified_base 4: mod_base = OTHER; note = 2'-Fluoro-guanosine
  modified_base 5: mod_base = OTHER; note = 2'-Fluoro-adenosine
  modified_base 6: mod_base = OTHER; note = 2'-Fluoro-adenosine
  modified_base 7: mod_base = OTHER; note = 2'-Fluoro-uridine
  modified_base 8: mod_base = um
  modified_base 9: mod_base = gm
  modified_base 10: mod_base = um
  modified_base 11: mod_base = gm
  modified_base 12: mod_base = OTHER; note = 2'-O-methyl-adenosine
  modified_base 13: mod_base = cm
  misc_feature 14..16: note = linked via phosphorothioate
  modified_base 14: mod_base = um
  modified_base 15: mod_base = gm
  modified_base 16: mod_base = OTHER; note = 2'-O-methyl-adenosine
  source 1..16: mol_type = other RNA
tgagaattgtgactga

SEQ ID NO: 609 - RNA, 16 nt, synthetic construct
  misc_feature 1^2: note = linked via phosphorothioate
  modified_base 1: mod_base = um
  modified_base 2: mod_base = gm
  modified_base 3: mod_base = OTHER; note = 2'-O-methyl-adenosine
  modified_base 4: mod_base = OTHER; note = hexadecanamidodiethoxymethanol-guanosine
  modified_base 5: mod_base = OTHER; note = 2'-Fluoro-adenosine
  modified_base 6: mod_base = OTHER; note = 2'-Fluoro-adenosine
  modified_base 7: mod_base = OTHER; note = 2'-Fluoro-uridine
  modified_base 8: mod_base = um
  modified_base 9: mod_base = gm
  modified_base 10: mod_base = um
  modified_base 11: mod_base = gm
  modified_base 12: mod_base = OTHER; note = 2'-O-methyl-adenosine
  modified_base 13: mod_base = cm
  misc_feature 14..16: note = linked via phosphorothioate
  modified_base 14: mod_base = um
  modified_base 15: mod_base = gm
  modified_base 16: mod_base = OTHER; note = 2'-O-methyl-adenosine
  source 1..16: mol_type = other RNA
tgagaattgtgactga

SEQ ID NO: 610 - RNA, 16 nt, synthetic construct
  misc_feature 1^2: note = linked via phosphorothioate
  modified_base 1: mod_base = um
  modified_base 2: mod_base = gm
  modified_base 3: mod_base = OTHER; note = 2'-O-methyl-adenosine
  modified_base 4: mod_base = OTHER; note = 2'-Fluoro-guanosine
  modified_base 5: mod_base = OTHER; note = hexadecanamidodiethoxymethanol-adenosine
  modified_base 6: mod_base = OTHER; note = 2'-Fluoro-adenosine
  modified_base 7: mod_base = OTHER; note = 2'-Fluoro-uridine
  modified_base 8: mod_base = um
  modified_base 9: mod_base = gm
  modified_base 10: mod_base = um
  modified_base 11: mod_base = gm
  modified_base 12: mod_base = OTHER; note = 2'-O-methyl-adenosine
  modified_base 13: mod_base = cm
  misc_feature 14..16: note = linked via phosphorothioate
  modified_base 14: mod_base = um
  modified_base 15: mod_base = gm
  modified_base 16: mod_base = OTHER; note = 2'-O-methyl-adenosine
  source 1..16: mol_type = other RNA
tgagaattgtgactga

SEQ ID NO: 611 - RNA, 14 nt, synthetic construct
  misc_feature 1^2: note = linked via phosphorothioate
  modified_base 1: mod_base = OTHER; note = 2'-O-methyl-adenosine
  modified_base 2: mod_base = OTHER; note = hexadecanamidodiethoxymethanol-guanosine
  modified_base 3: mod_base = OTHER; note = 2'-Fluoro-adenosine
  modified_base 4: mod_base = OTHER; note = 2'-Fluoro-adenosine
  modified_base 5: mod_base = OTHER; note = 2'-Fluoro-uridine
  modified_base 6: mod_base = um
  modified_base 7: mod_base = gm
  modified_base 8: mod_base = um
  modified_base 9: mod_base = gm
  modified_base 10: mod_base = OTHER; note = 2'-O-methyl-adenosine
  modified_base 11: mod_base = cm
  misc_feature 12..14: note = linked via phosphorothioate
  modified_base 12: mod_base = um
  modified_base 13: mod_base = gm
  modified_base 14: mod_base = OTHER; note = 2'-O-methyl-adenosine
  source 1..14: mol_type = other RNA
agaattgtgactga

SEQ ID NO: 612 - RNA, 14 nt, synthetic construct
  misc_feature 1^2: note = linked via phosphorothioate
  modified_base 1: mod_base = OTHER; note = 2'-O-methyl-adenosine
  modified_base 2: mod_base = gm
  modified_base 3: mod_base = OTHER; note = hexadecanamidodiethoxymethanol-adenosine
  modified_base 4: mod_base = OTHER; note = 2'-Fluoro-adenosine
  modified_base 5: mod_base = OTHER; note = 2'-Fluoro-uridine
  modified_base 6: mod_base = um
  modified_base 7: mod_base = gm
  modified_base 8: mod_base = um
  modified_base 9: mod_base = gm
  modified_base 10: mod_base = OTHER; note = 2'-O-methyl-adenosine
  modified_base 11: mod_base = cm
  misc_feature 12..14: note = linked via phosphorothioate
  modified_base 12: mod_base = um
  modified_base 13: mod_base = gm
  modified_base 14: mod_base = OTHER; note = 2'-O-methyl-adenosine
  source 1..14: mol_type = other RNA
agaattgtgactga

SEQ ID NO: 613 - RNA, 12 nt, synthetic construct
  misc_feature 1^2: note = linked via phosphorothioate
  modified_base 1: mod_base = OTHER; note = hexadecanamidodiethoxymethanol-adenosine
  modified_base 2: mod_base = OTHER; note = 2'-Fluoro-adenosine
  modified_base 3: mod_base = OTHER; note = 2'-Fluoro-uridine
  modified_base 4: mod_base = um
  modified_base 5: mod_base = gm
  modified_base 6: mod_base = um
  modified_base 7: mod_base = gm
  modified_base 8: mod_base = OTHER; note = 2'-O-methyl-adenosine
  modified_base 9: mod_base = cm
  misc_feature 10..12: note = linked via phosphorothioate
  modified_base 10: mod_base = um
  modified_base 11: mod_base = gm
  modified_base 12: mod_base = OTHER; note = 2'-O-methyl-adenosine
  source 1..12: mol_type = other RNA
aattgtgactga

SEQ ID NO: 614 - DNA, 20 bp, synthetic construct
  misc_feature 1..5: note = RNA fragment
  misc_feature 16: note = DNA fragment
  misc_feature 17..20: note = RNA fragment
  source 1..20: mol_type = other DNA
aggatctactcaacgttaaa

SEQ ID NO: 615 - DNA, 16 bp, synthetic construct
  misc_feature 1..11: note = RNA fragment
  misc_feature 12: note = DNA fragment
  misc_feature 13..16: note = RNA fragment
  source 1..16: mol_type = other DNA
tctactcaacgttaaa

SEQ ID NO: 616 - DNA, 16 bp, synthetic construct
  misc_feature 1: note = RNA fragment
  misc_feature 2: note = DNA fragment
  misc_feature 3..12: note = RNA fragment
  misc_feature 13: note = DNA fragment
  misc_feature 14..16: note = RNA fragment
  source 1..16: mol_type = other DNA
atctactcaacgttaa

SEQ ID NO: 617 - DNA, 16 bp, synthetic construct
  misc_feature 1..13: note = RNA fragment
  misc_feature 14: note = DNA fragment
  misc_feature 15..16: note = RNA fragment
  source 1..16: mol_type = other DNA
gatctactcaacgtta

SEQ ID NO: 618 - DNA, 16 bp, synthetic construct
  misc_feature 1..14: note = RNA fragment
  misc_feature 15: note = DNA fragment
  misc_feature 16: note = RNA fragment
  source 1..16: mol_type = other DNA
ggatctactcaacgtt

SEQ ID NO: 619 - DNA, 16 bp, synthetic construct
  misc_feature 1..15: note = RNA fragment
  misc_feature 16: note = DNA fragment
  source 1..16: mol_type = other DNA
aggatctactcaacgt

SEQ ID NO: 620 - DNA, 14 bp, synthetic construct
  misc_feature 1..9: note = RNA fragment
  misc_feature 10: note = DNA fragment
  misc_feature 11..14: note = RNA fragment
  source 1..14: mol_type = other DNA
tactcaacgttaaa

SEQ ID NO: 621 - DNA, 14 bp, synthetic construct
  misc_feature 1: note = RNA fragment
  misc_feature 2: note = DNA fragment
  misc_feature 3..10: note = RNA fragment
  misc_feature 11: note = DNA fragment
  misc_feature 12..14: note = RNA fragment
  source 1..14: mol_type = other DNA
ctactcaacgttaa

SEQ ID NO: 622 - DNA, 14 bp, synthetic construct
  misc_feature 1..11: note = RNA fragment
  misc_feature 12: note = DNA fragment
  misc_feature 13..14: note = RNA fragment
  source 1..14: mol_type = other DNA
tctactcaacgtta

SEQ ID NO: 623 - DNA, 14 bp, synthetic construct
  misc_feature 1: note = RNA fragment
  misc_feature 2: note = DNA fragment
  misc_feature 3..12: note = RNA fragment
  misc_feature 13: note = DNA fragment
  misc_feature 14: note = RNA fragment
  source 1..14: mol_type = other DNA
atctactcaacgtt

SEQ ID NO: 624 - DNA, 14 bp, synthetic construct
  misc_feature 1..13: note = RNA fragment
  misc_feature 14: note = DNA fragment
  source 1..14: mol_type = other DNA
gatctactcaacgt

SEQ ID NO: 625 - DNA, 12 bp, synthetic construct
  misc_feature 1: note = RNA fragment
  misc_feature 2: note = DNA fragment
  misc_feature 3..7: note = RNA fragment
  misc_feature 8: note = DNA fragment
  misc_feature 9..12: note = RNA fragment
  source 1..12: mol_type = other DNA
ctcaacgttaaa

SEQ ID NO: 626 - DNA, 12 bp, synthetic construct
  misc_feature 1..8: note = RNA fragment
  misc_feature 9: note = DNA fragment
  misc_feature 10..12: note = RNA fragment
  source 1..12: mol_type = other DNA
actcaacgttaa

SEQ ID NO: 627 - DNA, 12 bp, synthetic construct
  misc_feature 1..9: note = RNA fragment
  misc_feature 10: note = DNA fragment
  misc_feature 11..12: note = RNA fragment
  source 1..12: mol_type = other DNA
tactcaacgtta

SEQ ID NO: 628 - DNA, 12 bp, synthetic construct
  misc_feature 1: note = RNA fragment
  misc_feature 2: note = DNA fragment
  misc_feature 3..10: note = RNA fragment
  misc_feature 11: note = DNA fragment
  misc_feature 12: note = RNA fragment
  source 1..12: mol_type = other DNA
ctactcaacgtt

SEQ ID NO: 629 - DNA, 12 bp, synthetic construct
  misc_feature 1..11: note = RNA fragment
  misc_feature 12: note = DNA fragment
  source 1..12: mol_type = other DNA
tctactcaacgt

SEQ ID NO: 630 - DNA, 16 bp, synthetic construct
  misc_feature 1: note = RNA fragment
  misc_feature 2: note = DNA fragment
  misc_feature 3..16: note = RNA fragment
  source 1..16: mol_type = other DNA
gtgagaattgtgactg

SEQ ID NO: 631 - RNA, 16 nt, synthetic construct
  source 1..16: mol_type = other RNA
tgtgagaattgtgact

SEQ ID NO: 632 - DNA, 16 bp, synthetic construct
  misc_feature 1: note = RNA fragment
  misc_feature 2: note = DNA fragment
  misc_feature 3..16: note = RNA fragment
  source 1..16: mol_type = other DNA
gtgtgagaattgtgac

SEQ ID NO: 633 - RNA, 14 nt, synthetic construct
  source 1..14: mol_type = other RNA
gagaattgtgactg

SEQ ID NO: 634 - RNA, 14 nt, synthetic construct
  source 1..14: mol_type = other RNA
tgagaattgtgact

SEQ ID NO: 635 - DNA, 14 bp, synthetic construct
  misc_feature 1: note = RNA fragment
  misc_feature 2: note = DNA fragment
  misc_feature 3..14: note = RNA fragment
  source 1..14: mol_type = other DNA
gtgagaattgtgac

SEQ ID NO: 636 - RNA, 14 nt, synthetic construct
  source 1..14: mol_type = other RNA
tgtgagaattgtga

SEQ ID NO: 637 - RNA, 12 nt, synthetic construct
  source 1..12: mol_type = other RNA
gaattgtgactg

SEQ ID NO: 638 - RNA, 12 nt, synthetic construct
  source 1..12: mol_type = other RNA
agaattgtgact

SEQ ID NO: 639 - RNA, 12 nt, synthetic construct
  source 1..12: mol_type = other RNA
gagaattgtgac

SEQ ID NO: 640 - RNA, 12 nt, synthetic construct
  source 1..12: mol_type = other RNA
tgagaattgtga

SEQ ID NO: 641 - RNA, 16 nt, synthetic construct
  source 1..16: mol_type = other RNA
tctactcaacgttaaa

SEQ ID NO: 642 - RNA, 14 nt, synthetic construct
  source 1..14: mol_type = other RNA
tctactcaacgtta

SEQ ID NO: 643 - RNA, 12 nt, synthetic construct
  source 1..12: mol_type = other RNA
tactcaacgtta

SEQ ID NO: 644 - DNA, 20 bp, synthetic construct
  misc_feature 1..13: note = RNA fragment
  misc_feature 14: note = DNA fragment
  misc_feature 15..20: note = RNA fragment
  source 1..20: mol_type = other DNA
agtgtgagaattgtgactga

SEQ ID NO: 645-664 - skipped (20 entries)

SEQ ID NO: 665 - DNA, 10 bp, synthetic construct
  misc_feature 1: note = RNA fragment
  misc_feature 2: note = DNA fragment
  misc_feature 3..10: note = RNA fragment
  source 1..10: mol_type = other DNA
ttgtgactga

SEQ ID NO: 666 - DNA, 10 bp, synthetic construct
  misc_feature 1: note = RNA fragment
  misc_feature 2: note = DNA fragment
  misc_feature 3..10: note = RNA fragment
  source 1..10: mol_type = other DNA
attgtgactg

SEQ ID NO: 667 - RNA, 10 nt, synthetic construct
  source 1..10: mol_type = other RNA
aattgtgact

SEQ ID NO: 668 - RNA, 10 nt, synthetic construct
  source 1..10: mol_type = other RNA
gaattgtgac

SEQ ID NO: 669 - RNA, 10 nt, synthetic construct
  source 1..10: mol_type = other RNA
agaattgtga

SEQ ID NO: 670 - DNA, 10 bp, synthetic construct
  misc_feature 1..8: note = RNA fragment
  misc_feature 9: note = DNA fragment
  misc_feature 10: note = RNA fragment
  source 1..10: mol_type = other DNA
gagaattgtg

SEQ ID NO: 671 - DNA, 10 bp, synthetic construct
  misc_feature 1..9: note = RNA fragment
  misc_feature 10: note = DNA fragment
  source 1..10: mol_type = other DNA
tgagaattgt

SEQ ID NO: 672 - DNA, 16 bp, synthetic construct
  misc_feature 1..11: note = RNA fragment
  misc_feature 12: note = DNA fragment
  misc_feature 13..16: note = RNA fragment
  misc_feature 1^2: note = linked via phosphorothioate
  modified_base 1: mod_base = OTHER; note = hexadecanamidodiethoxymethanol-uridine
  modified_base 2: mod_base = OTHER; note = 2'-O,4'-C-Methylenecytidine
  modified_base 3: mod_base = um
  modified_base 4: mod_base = OTHER; note = 2'-Fluoro-adenosine
  modified_base 5: mod_base = OTHER; note = 2'-Fluoro-cytidine
  modified_base 6: mod_base = OTHER; note = 2'-Fluoro-uridine
  modified_base 7: mod_base = OTHER; note = 2'-Fluoro-cytidine
  modified_base 8: mod_base = OTHER; note = 2'-O-methyl-adenosine
  modified_base 9: mod_base = OTHER; note = 2'-O-methyl-adenosine
  modified_base 10: mod_base = cm
  modified_base 11: mod_base = OTHER; note = 2'-O,4'-C-Methyleneguanosine
  modified_base 12: mod_base = OTHER; note = 2'-O,4'-C-Methylenethymine
  modified_base 13: mod_base = um
  misc_feature 14..16: note = linked via phosphorothioate
  modified_base 14: mod_base = OTHER; note = 2'-O-methyl-adenosine
  modified_base 15: mod_base = OTHER; note = 2'-O-methyl-adenosine
  modified_base 16: mod_base = OTHER; note = 2'-O-methyl-adenosine
  source 1..16: mol_type = other DNA
tctactcaacgttaaa

SEQ ID NO: 673 - DNA, 16 bp, synthetic construct
  misc_feature 1: note = RNA fragment
  misc_feature 2: note = DNA fragment
  misc_feature 3..12: note = RNA fragment
  misc_feature 13: note = DNA fragment
  misc_feature 14..16: note = RNA fragment
  misc_feature 1^2: note = linked via phosphorothioate
  modified_base 1: mod_base = OTHER; note = hexadecanamidodiethoxymethanol-adenosine
  modified_base 2: mod_base = OTHER; note = 2'-O,4'-C-Methylenethymine
  modified_base 3: mod_base = cm
  modified_base 4: mod_base = um
  modified_base 5: mod_base = OTHER; note = 2'-Fluoro-adenosine
  modified_base 6: mod_base = OTHER; note = 2'-Fluoro-cytidine
  modified_base 7: mod_base = OTHER; note = 2'-Fluoro-uridine
  modified_base 8: mod_base = OTHER; note = 2'-Fluoro-cytidine
  modified_base 9: mod_base = OTHER; note = 2'-O-methyl-adenosine
  modified_base 10: mod_base = OTHER; note = 2'-O-methyl-adenosine
  modified_base 11: mod_base = cm
  modified_base 12: mod_base = OTHER; note = 2'-O,4'-C-Methyleneguanosine
  modified_base 13: mod_base = OTHER; note = 2'-O,4'-C-Methylenethymine
  misc_feature 14..16: note = linked via phosphorothioate
  modified_base 14: mod_base = um
  modified_base 15: mod_base = OTHER; note = 2'-O-methyl-adenosine
  modified_base 16: mod_base = OTHER; note = 2'-O-methyl-adenosine
  source 1..16: mol_type = other DNA
atctactcaacgttaa

SEQ ID NO: 674 - DNA, 16 bp, synthetic construct
  misc_feature 1..13: note = RNA fragment
  misc_feature 14: note = DNA fragment
  misc_feature 15..16: note = RNA fragment
  misc_feature 1^2: note = linked via phosphorothioate
  modified_base 1: mod_base = OTHER; note = hexadecanamidodiethoxymethanol-guanosine
  modified_base 2: mod_base = OTHER; note = 2'-O,4'-C-Methyleneadenosine
  modified_base 3: mod_base = um
  modified_base 4: mod_base = cm
  modified_base 5: mod_base = um
  modified_base 6: mod_base = OTHER; note = 2'-Fluoro-adenosine
  modified_base 7: mod_base = OTHER; note = 2'-Fluoro-cytidine
  modified_base 8: mod_base = OTHER; note = 2'-Fluoro-uridine
  modified_base 9: mod_base = OTHER; note = 2'-Fluoro-cytidine
  modified_base 10: mod_base = OTHER; note = 2'-O-methyl-adenosine
  modified_base 11: mod_base = OTHER; note = 2'-O-methyl-adenosine
  modified_base 12: mod_base = cm
  modified_base 13: mod_base = OTHER; note = 2'-O,4'-C-Methyleneguanosine
  misc_feature 14..16: note = linked via phosphorothioate
  modified_base 14: mod_base = OTHER; note = 2'-O,4'-C-Methylenethymine
  modified_base 15: mod_base = um
  modified_base 16: mod_base = OTHER; note = 2'-O-methyl-adenosine
  source 1..16: mol_type = other DNA
gatctactcaacgtta

SEQ ID NO: 675 - DNA, 16 bp, synthetic construct
  misc_feature 1..14: note = RNA fragment
  misc_feature 15: note = DNA fragment
  misc_feature 16: note = RNA fragment
  misc_feature 1^2: note = linked via phosphorothioate
  modified_base 1: mod_base = OTHER; note = hexadecanamidodiethoxymethanol-guanosine
  modified_base 2: mod_base = OTHER; note = 2'-O,4'-C-Methyleneguanosine
  modified_base 3: mod_base = OTHER; note = 2'-O-methyl-adenosine
  modified_base 4: mod_base = um
  modified_base 5: mod_base = cm
  modified_base 6: mod_base = um
  modified_base 7: mod_base = OTHER; note = 2'-Fluoro-adenosine
  modified_base 8: mod_base = OTHER; note = 2'-Fluoro-cytidine
  modified_base 9: mod_base = OTHER; note = 2'-Fluoro-uridine
  modified_base 10: mod_base = OTHER; note = 2'-Fluoro-cytidine
  modified_base 11: mod_base = OTHER; note = 2'-O-methyl-adenosine
  modified_base 12: mod_base = OTHER; note = 2'-O-methyl-adenosine
  modified_base 13: mod_base = cm
  misc_feature 14..16: note = linked via phosphorothioate
  modified_base 14: mod_base = OTHER; note = 2'-O,4'-C-Methyleneguanosine
  modified_base 15: mod_base = OTHER; note = 2'-O,4'-C-Methylenethymine
  modified_base 16: mod_base = um
  source 1..16: mol_type = other DNA
ggatctactcaacgtt

SEQ ID NO: 676 - DNA, 16 bp, synthetic construct
  misc_feature 1..15: note = RNA fragment
  misc_feature 16: note = DNA fragment
  misc_feature 1^2: note = linked via phosphorothioate
  modified_base 1: mod_base = OTHER; note = hexadecanamidodiethoxymethanol-adenosine
  modified_base 2: mod_base = OTHER; note = 2'-O,4'-C-Methyleneguanosine
  modified_base 3: mod_base = gm
  modified_base 4: mod_base = OTHER; note = 2'-O-methyl-adenosine
  modified_base 5: mod_base = um
  modified_base 6: mod_base = cm
  modified_base 7: mod_base = um
  modified_base 8: mod_base = OTHER; note = 2'-Fluoro-adenosine
  modified_base 9: mod_base = OTHER; note = 2'-Fluoro-cytidine
  modified_base 10: mod_base = OTHER; note = 2'-Fluoro-uridine
  modified_base 11: mod_base = OTHER; note = 2'-Fluoro-cytidine
  modified_base 12: mod_base = OTHER; note = 2'-O-methyl-adenosine
  modified_base 13: mod_base = OTHER; note = 2'-O-methyl-adenosine
  misc_feature 14..16: note = linked via phosphorothioate
  modified_base 14: mod_base = cm
  modified_base 15: mod_base = OTHER; note = 2'-O,4'-C-Methyleneguanosine
  modified_base 16: mod_base = OTHER; note = 2'-O,4'-C-Methylenethymine
  source 1..16: mol_type = other DNA
aggatctactcaacgt

SEQ ID NO: 677 - DNA, 14 bp, synthetic construct
  misc_feature 1: note = RNA fragment
  misc_feature 2: note = DNA fragment
  misc_feature 3..10: note = RNA fragment
  misc_feature 11: note = DNA fragment
  misc_feature 12..14: note = RNA fragment
  misc_feature 1^2: note = linked via phosphorothioate
  modified_base 1: mod_base = OTHER; note = hexadecanamidodiethoxymethanol-cytidine
  modified_base 2: mod_base = OTHER; note = 2'-O,4'-C-Methylenethymine
  modified_base 3: mod_base = OTHER; note = 2'-Fluoro-adenosine
  modified_base 4: mod_base = OTHER; note = 2'-Fluoro-cytidine
  modified_base 5: mod_base = OTHER; note = 2'-Fluoro-uridine
  modified_base 6: mod_base = OTHER; note = 2'-Fluoro-cytidine
  modified_base 7: mod_base = OTHER; note = 2'-O-methyl-adenosine
  modified_base 8: mod_base = OTHER; note = 2'-O-methyl-adenosine
  modified_base 9: mod_base = cm
  modified_base 10: mod_base = OTHER; note = 2'-O,4'-C-Methyleneguanosine
  modified_base 11: mod_base = OTHER; note = 2'-O,4'-C-Methylenethymine
  misc_feature 12..14: note = linked via phosphorothioate
  modified_base 12: mod_base = um
  modified_base 13: mod_base = OTHER; note = 2'-O-methyl-adenosine
  modified_base 14: mod_base = OTHER; note = 2'-O-methyl-adenosine
  source 1..14: mol_type = other DNA
ctactcaacgttaa

SEQ ID NO: 678 - DNA, 14 bp, synthetic construct
  misc_feature 1..11: note = RNA fragment
  misc_feature 12: note = DNA fragment
  misc_feature 13..14: note = RNA fragment
  misc_feature 1^2: note = linked via phosphorothioate
  modified_base 1: mod_base = OTHER; note = hexadecanamidodiethoxymethanol-uridine
  modified_base 2: mod_base = OTHER; note = 2'-O,4'-C-Methylenecytidine
  modified_base 3: mod_base = um
  modified_base 4: mod_base = OTHER; note = 2'-Fluoro-adenosine
  modified_base 5: mod_base = OTHER; note = 2'-Fluoro-cytidine
  modified_base 6: mod_base = OTHER; note = 2'-Fluoro-uridine
  modified_base 7: mod_base = OTHER; note = 2'-Fluoro-cytidine
  modified_base 8: mod_base = OTHER; note = 2'-O-methyl-adenosine
  modified_base 9: mod_base = OTHER; note = 2'-O-methyl-adenosine
  modified_base 10: mod_base = cm
  modified_base 11: mod_base = OTHER; note = 2'-O,4'-C-Methyleneguanosine
  misc_feature 12..14: note = linked via phosphorothioate
  modified_base 12: mod_base = OTHER; note = 2'-O,4'-C-Methylenethymine
  modified_base 13: mod_base = um
  modified_base 14: mod_base = OTHER; note = 2'-O-methyl-adenosine
  source 1..14: mol_type = other DNA
tctactcaacgtta

SEQ ID NO: 679 - DNA, 14 bp, synthetic construct
  misc_feature 1: note = RNA fragment
  misc_feature 2: note = DNA fragment
  misc_feature 3..12: note = RNA fragment
  misc_feature 13: note = DNA fragment
  misc_feature 14: note = RNA fragment
  misc_feature 1^2: note = linked via phosphorothioate
  modified_base 1: mod_base = OTHER; note = hexadecanamidodiethoxymethanol-adenosine
  modified_base 2: mod_base = OTHER; note = 2'-O,4'-C-Methylenethymine
  modified_base 3: mod_base = cm
  modified_base 4: mod_base = um
  modified_base 5: mod_base = OTHER; note = 2'-Fluoro-adenosine
  modified_base 6: mod_base = OTHER; note = 2'-Fluoro-cytidine
  modified_base 7: mod_base = OTHER; note = 2'-Fluoro-uridine
  modified_base 8: mod_base = OTHER; note = 2'-Fluoro-cytidine
  modified_base 9: mod_base = OTHER; note = 2'-O-methyl-adenosine
  modified_base 10: mod_base = OTHER; note = 2'-O-methyl-adenosine
  modified_base 11: mod_base = cm
  misc_feature 12..14: note = linked via phosphorothioate
  modified_base 12: mod_base = OTHER; note = 2'-O,4'-C-Methyleneguanosine
  modified_base 13: mod_base = OTHER; note = 2'-O,4'-C-Methylenethymine
  modified_base 14: mod_base = um
  source 1..14: mol_type = other DNA
atctactcaacgtt

SEQ ID NO: 680 - DNA, 14 bp, synthetic construct
  misc_feature 1..13: note = RNA fragment
  misc_feature 14: note = DNA fragment
  misc_feature 1^2: note = linked via phosphorothioate
  modified_base 1: mod_base = OTHER; note = hexadecanamidodiethoxymethanol-guanosine
  modified_base 2: mod_base = OTHER; note = 2'-O,4'-C-Methyleneadenosine
  modified_base 3: mod_base = um
  modified_base 4: mod_base = cm
  modified_base 5: mod_base = um
  modified_base 6: mod_base = OTHER; note = 2'-Fluoro-adenosine
  modified_base 7: mod_base = OTHER; note = 2'-Fluoro-cytidine
  modified_base 8: mod_base = OTHER; note = 2'-Fluoro-uridine
  modified_base 9: mod_base = OTHER; note = 2'-Fluoro-cytidine
  modified_base 10: mod_base = OTHER; note = 2'-O-methyl-adenosine
  modified_base 11: mod_base = OTHER; note = 2'-O-methyl-adenosine
  misc_feature 12..14: note = linked via phosphorothioate
  modified_base 12: mod_base = cm
  modified_base 13: mod_base = OTHER; note = 2'-O,4'-C-Methyleneguanosine
  modified_base 14: mod_base = OTHER; note = 2'-O,4'-C-Methylenethymine
  source 1..14: mol_type = other DNA
gatctactcaacgt

SEQ ID NO: 681 - DNA, 12 bp, synthetic construct
  misc_feature 1: note = RNA fragment
  misc_feature 2: note = DNA fragment
  misc_feature 3..7: note = RNA fragment
  misc_feature 8: note = DNA fragment
  misc_feature 9..12: note = RNA fragment
  misc_feature 1^2: note = linked via phosphorothioate
  modified_base 1: mod_base = OTHER; note = hexadecanamidodiethoxymethanol-cytidine
  modified_base 2: mod_base = OTHER; note = 2'-O,4'-C-Methylenethymine
  modified_base 3: mod_base = OTHER; note = 2'-Fluoro-cytidine
  modified_base 4: mod_base = OTHER; note = 2'-O-methyl-adenosine
  modified_base 5: mod_base = OTHER; note = 2'-O-methyl-adenosine
  modified_base 6: mod_base = cm
  modified_base 7: mod_base = OTHER; note = 2'-O,4'-C-Methyleneguanosine
  modified_base 8: mod_base = OTHER; note = 2'-O,4'-C-Methylenethymine
  modified_base 9: mod_base = um
  misc_feature 10..12: note = linked via phosphorothioate
  modified_base 10: mod_base = OTHER; note = 2'-O-methyl-adenosine
  modified_base 11: mod_base = OTHER; note = 2'-O-methyl-adenosine
  modified_base 12: mod_base = OTHER; note = 2'-O-methyl-adenosine
  source 1..12: mol_type = other DNA
ctcaacgttaaa

SEQ ID NO: 682 - DNA, 12 bp, synthetic construct
  misc_feature 1..8: note = RNA fragment
  misc_feature 9: note = DNA fragment
  misc_feature 10..12: note = RNA fragment
  misc_feature 1^2: note = linked via phosphorothioate
  modified_base 1: mod_base = OTHER; note = hexadecanamidodiethoxymethanol-adenosine
  modified_base 2: mod_base = OTHER; note = 2'-O,4'-C-Methylenecytidine
  modified_base 3: mod_base = OTHER; note = 2'-Fluoro-uridine
  modified_base 4: mod_base = OTHER; note = 2'-Fluoro-cytidine
  modified_base 5: mod_base = OTHER; note = 2'-O-methyl-adenosine
  modified_base 6: mod_base = OTHER; note = 2'-O-methyl-adenosine
  modified_base 7: mod_base = cm
  modified_base 8: mod_base = OTHER; note = 2'-O,4'-C-Methyleneguanosine
  modified_base 9: mod_base = OTHER; note = 2'-O,4'-C-Methylenethymine
  misc_feature 10..12: note = linked via phosphorothioate
  modified_base 10: mod_base = um
  modified_base 11: mod_base = OTHER; note = 2'-O-methyl-adenosine
  modified_base 12: mod_base = OTHER; note = 2'-O-methyl-adenosine
  source 1..12: mol_type = other DNA
actcaacgttaa

SEQ ID NO: 683 - DNA, 12 bp, synthetic construct
  misc_feature 1..9: note = RNA fragment
  misc_feature 10: note = DNA fragment
  misc_feature 11..12: note = RNA fragment
  misc_feature 1^2: note = linked via phosphorothioate
  modified_base 1: mod_base = OTHER; note = hexadecanamidodiethoxymethanol-uridine
  modified_base 2: mod_base = OTHER; note = 2'-O,4'-C-Methyleneadenosine
  modified_base 3: mod_base = OTHER; note = 2'-Fluoro-cytidine
  modified_base 4: mod_base = OTHER; note = 2'-Fluoro-uridine
  modified_base 5: mod_base = OTHER; note = 2'-Fluoro-cytidine
  modified_base 6: mod_base = OTHER; note = 2'-O-methyl-adenosine
  modified_base 7: mod_base = OTHER; note = 2'-O-methyl-adenosine
  modified_base 8: mod_base = cm
  modified_base 9: mod_base = OTHER; note = 2'-O,4'-C-Methyleneguanosine
  misc_feature 10..12: note = linked via phosphorothioate
  modified_base 10: mod_base = OTHER; note = 2'-O,4'-C-Methylenethymine
  modified_base 11: mod_base = um
  modified_base 12: mod_base = OTHER; note = 2'-O-methyl-adenosine
  source 1..12: mol_type = other DNA
tactcaacgtta

SEQ ID NO: 684 - DNA, 12 bp, synthetic construct
  misc_feature 1: note = RNA fragment
  misc_feature 2: note = DNA fragment
  misc_feature 3..10: note = RNA fragment
  misc_feature 11: note = DNA fragment
  misc_feature 12: note = RNA fragment
  misc_feature 1^2: note = linked via phosphorothioate
  modified_base 1: mod_base = OTHER; note = hexadecanamidodiethoxymethanol-cytidine
  modified_base 2: mod_base = OTHER; note = 2'-O,4'-C-Methylenethymine
  modified_base 3: mod_base = OTHER; note = 2'-Fluoro-adenosine
  modified_base 4: mod_base = OTHER; note = 2'-Fluoro-cytidine
  modified_base 5: mod_base = OTHER; note = 2'-Fluoro-uridine
  modified_base 6: mod_base = OTHER; note = 2'-Fluoro-cytidine
  modified_base 7: mod_base = OTHER; note = 2'-O-methyl-adenosine
  modified_base 8: mod_base = OTHER; note = 2'-O-methyl-adenosine
  modified_base 9: mod_base = cm
  misc_feature 10..12: note = linked via phosphorothioate
  modified_base 10: mod_base = OTHER; note = 2'-O,4'-C-Methyleneguanosine
  modified_base 11: mod_base = OTHER; note = 2'-O,4'-C-Methylenethymine
  modified_base 12: mod_base = um
  source 1..12: mol_type = other DNA
ctactcaacgtt

SEQ ID NO: 685 - DNA, 12 bp, synthetic construct
  misc_feature 1..11: note = RNA fragment
  misc_feature 12: note = DNA fragment
  misc_feature 1^2: note = linked via phosphorothioate
  modified_base 1: mod_base = OTHER; note = hexadecanamidodiethoxymethanol-uridine
  modified_base 2: mod_base = OTHER; note = 2'-O,4'-C-Methylenecytidine
  modified_base 3: mod_base = um
  modified_base 4: mod_base = OTHER; note = 2'-Fluoro-adenosine
  modified_base 5: mod_base = OTHER; note = 2'-Fluoro-cytidine
  modified_base 6: mod_base = OTHER; note = 2'-Fluoro-uridine
  modified_base 7: mod_base = OTHER; note = 2'-Fluoro-cytidine
  modified_base 8: mod_base = OTHER; note = 2'-O-methyl-adenosine
  modified_base 9: mod_base = OTHER; note = 2'-O-methyl-adenosine
  misc_feature 10..12: note = linked via phosphorothioate
  modified_base 10: mod_base = cm
  modified_base 11: mod_base = OTHER; note = 2'-O,4'-C-Methyleneguanosine
  modified_base 12: mod_base = OTHER; note = 2'-O,4'-C-Methylenethymine
  source 1..12: mol_type = other DNA
tctactcaacgt

SEQ ID NO: 686 - DNA, 16 bp, synthetic construct
  misc_feature 1: note = RNA fragment
  misc_feature 2: note = DNA fragment
  misc_feature 3..16: note = RNA fragment
  misc_feature 1^2: note = linked via phosphorothioate
  modified_base 1: mod_base = OTHER; note = hexadecanamidodiethoxymethanol-guanosine
  modified_base 2: mod_base = OTHER; note = 2'-O,4'-C-Methylenethymine
  modified_base 3: mod_base = gm
  modified_base 4: mod_base = OTHER; note = 2'-O-methyl-adenosine
  modified_base 5: mod_base = OTHER; note = 2'-Fluoro-guanosine
  modified_base 6: mod_base = OTHER; note = 2'-Fluoro-adenosine
  modified_base 7: mod_base = OTHER; note = 2'-Fluoro-adenosine
  modified_base 8: mod_base = OTHER; note = 2'-Fluoro-uridine
  modified_base 9: mod_base = um
  modified_base 10: mod_base = gm
  modified_base 11: mod_base = um
  modified_base 12: mod_base = OTHER; note = 2'-O,4'-C-Methyleneguanosine
  modified_base 13: mod_base = OTHER; note = 2'-O,4'-C-Methyleneadenosine
  misc_feature 14..16: note = linked via phosphorothioate
  modified_base 14: mod_base = cm
  modified_base 15: mod_base = um
  modified_base 16: mod_base = gm
  source 1..16: mol_type = other DNA
gtgagaattgtgactg

SEQ ID NO: 687 - RNA, 16 nt, synthetic construct
  misc_feature 1^2: note = linked via phosphorothioate
  modified_base 1: mod_base = OTHER; note = hexadecanamidodiethoxymethanol-uridine
  modified_base 2: mod_base = OTHER; note = 2'-O,4'-C-Methyleneguanosine
  modified_base 3: mod_base = um
  modified_base 4: mod_base = gm
  modified_base 5: mod_base = OTHER; note = 2'-O-methyl-adenosine
  modified_base 6: mod_base = OTHER; note = 2'-Fluoro-guanosine
  modified_base 7: mod_base = OTHER; note = 2'-Fluoro-adenosine
  modified_base 8: mod_base = OTHER; note = 2'-Fluoro-adenosine
  modified_base 9: mod_base = OTHER; note = 2'-Fluoro-uridine
  modified_base 10: mod_base = um
  modified_base 11: mod_base = gm
  modified_base 12: mod_base = um
  modified_base 13: mod_base = OTHER; note = 2'-O,4'-C-Methyleneguanosine
  misc_feature 14..16: note = linked via phosphorothioate
  modified_base 14: mod_base = OTHER; note = 2'-O,4'-C-Methyleneadenosine
  modified_base 15: mod_base = cm
  modified_base 16: mod_base = um
  source 1..16: mol_type = other RNA
tgtgagaattgtgact

SEQ ID NO: 688 - DNA, 16 bp, synthetic construct
  misc_feature 1: note = RNA fragment
  misc_feature 2: note = DNA fragment
  misc_feature 3..16: note = RNA fragment
  misc_feature 1^2: note = linked via phosphorothioate
  modified_base 1: mod_base = OTHER; note = hexadecanamidodiethoxymethanol-guanosine
  modified_base 2: mod_base = OTHER; note = 2'-O,4'-C-Methylenethymine
  modified_base 3: mod_base = gm
  modified_base 4: mod_base = um
  modified_base 5: mod_base = gm
  modified_base 6: mod_base = OTHER; note = 2'-O-methyl-adenosine
  modified_base 7: mod_base = OTHER; note = 2'-Fluoro-guanosine
  modified_base 8: mod_base = OTHER; note = 2'-Fluoro-adenosine
  modified_base 9: mod_base = OTHER; note = 2'-Fluoro-adenosine
  modified_base 10: mod_base = OTHER; note = 2'-Fluoro-uridine
  modified_base 11: mod_base = um
  modified_base 12: mod_base = gm
  modified_base 13: mod_base = um
  misc_feature 14..16: note = linked via phosphorothioate
  modified_base 14: mod_base = OTHER; note = 2'-O,4'-C-Methyleneguanosine
  modified_base 15: mod_base = OTHER; note = 2'-O,4'-C-Methyleneadenosine
  modified_base 16: mod_base = cm
  source 1..16: mol_type = other DNA
gtgtgagaattgtgac

SEQ ID NO: 689 - RNA, 14 nt, synthetic construct
  misc_feature 1^2: note = linked via phosphorothioate
  modified_base 1: mod_base = OTHER; note = hexadecanamidodiethoxymethanol-guanosine
  modified_base 2: mod_base = OTHER; note = 2'-O,4'-C-Methyleneadenosine
  modified_base 3: mod_base = OTHER; note = 2'-Fluoro-guanosine
  modified_base 4: mod_base = OTHER; note = 2'-Fluoro-adenosine
  modified_base 5: mod_base = OTHER; note = 2'-Fluoro-adenosine
  modified_base 6: mod_base = OTHER; note = 2'-Fluoro-uridine
  modified_base 7: mod_base = um
  modified_base 8: mod_base = gm
  modified_base 9: mod_base = um
  modified_base 10: mod_base = OTHER; note = 2'-O,4'-C-Methyleneguanosine
  modified_base 11: mod_base = OTHER; note = 2'-O,4'-C-Methyleneadenosine
  misc_feature 12..14: note = linked via phosphorothioate
  modified_base 12: mod_base = cm
  modified_base 13: mod_base = um
  modified_base 14: mod_base = gm
  source 1..14: mol_type = other RNA
gagaattgtgactg

SEQ ID NO: 690 - RNA, 14 nt, synthetic construct
  misc_feature 1^2: note = linked via phosphorothioate
  modified_base 1: mod_base = OTHER; note = hexadecanamidodiethoxymethanol-uridine
  modified_base 2: mod_base = OTHER; note = 2'-O,4'-C-Methyleneguanosine
  modified_base 3: mod_base = OTHER; note = 2'-O-methyl-adenosine
  modified_base 4: mod_base = OTHER; note = 2'-Fluoro-guanosine
  modified_base 5: mod_base = OTHER; note = 2'-Fluoro-adenosine
  modified_base 6: mod_base = OTHER; note = 2'-Fluoro-adenosine
  modified_base 7: mod_base = OTHER; note = 2'-Fluoro-uridine
  modified_base 8: mod_base = um
  modified_base 9: mod_base = gm
  modified_base 10: mod_base = um
  modified_base 11: mod_base = OTHER; note = 2'-O,4'-C-Methyleneguanosine
  misc_feature 12..14: note = linked via phosphorothioate
  modified_base 12: mod_base = OTHER; note = 2'-O,4'-C-Methyleneadenosine
  modified_base 13: mod_base = cm
  modified_base 14: mod_base = um
  source 1..14: mol_type = other RNA
tgagaattgtgact

SEQ ID NO: 691 - DNA, 14 bp, synthetic construct
  misc_feature 1: note = RNA fragment
  misc_feature 2: note = DNA fragment
  misc_feature 3..14: note = RNA fragment
  misc_feature 1^2: note = linked via phosphorothioate
  modified_base 1: mod_base = OTHER; note = hexadecanamidodiethoxymethanol-guanosine
  modified_base 2: mod_base = OTHER; note = 2'-O,4'-C-Methylenethymine
  modified_base 3: mod_base = gm
  modified_base 4: mod_base = OTHER; note = 2'-O-methyl-adenosine
  modified_base 5: mod_base = OTHER; note = 2'-Fluoro-guanosine
  modified_base 6: mod_base = OTHER; note = 2'-Fluoro-adenosine
  modified_base 7: mod_base = OTHER; note = 2'-Fluoro-adenosine
  modified_base 8: mod_base = OTHER; note = 2'-Fluoro-uridine
  modified_base 9: mod_base = um
  modified_base 10: mod_base = gm
  modified_base 11: mod_base = um
  misc_feature 12..14: note = linked via phosphorothioate
  modified_base 12: mod_base = OTHER; note = 2'-O,4'-C-Methyleneguanosine
  modified_base 13: mod_base = OTHER; note = 2'-O,4'-C-Methyleneadenosine
  modified_base 14: mod_base = cm
  source 1..14: mol_type = other DNA
gtgagaattgtgac

SEQ ID NO: 692 - RNA, 14 nt, synthetic construct
  misc_feature 1^2: note = linked via phosphorothioate
  modified_base 1: mod_base = OTHER; note = hexadecanamidodiethoxymethanol-uridine
  modified_base 2: mod_base = OTHER; note = 2'-O,4'-C-Methyleneguanosine
  modified_base 3: mod_base = um
  modified_base 4: mod_base = gm
  modified_base 5: mod_base = OTHER; note = 2'-O-methyl-adenosine
  modified_base 6: mod_base = OTHER; note = 2'-Fluoro-guanosine
  modified_base 7: mod_base = OTHER; note = 2'-Fluoro-adenosine
  modified_base 8: mod_base = OTHER; note = 2'-Fluoro-adenosine
  modified_base 9: mod_base = OTHER; note = 2'-Fluoro-uridine
  modified_base 10: mod_base = um
  modified_base 11: mod_base = gm
  misc_feature 12..14: note = linked via phosphorothioate
  modified_base 12: mod_base = um
  modified_base 13: mod_base = OTHER; note = 2'-O,4'-C-Methyleneguanosine
  modified_base 14: mod_base = OTHER; note = 2'-O,4'-C-Methyleneadenosine
  source 1..14: mol_type = other RNA
tgtgagaattgtga

SEQ ID NO: 693 - RNA, 12 nt, synthetic construct
  misc_feature 1^2: note = linked via phosphorothioate
  modified_base 1: mod_base = OTHER; note = hexadecanamidodiethoxymethanol-guanosine
  modified_base 2: mod_base = OTHER; note = 2'-O,4'-C-Methyleneadenosine
  modified_base 3: mod_base = OTHER; note = 2'-Fluoro-adenosine
  modified_base 4: mod_base = OTHER; note = 2'-Fluoro-uridine
  modified_base 5: mod_base = um
  modified_base 6: mod_base = gm
  modified_base 7: mod_base = um
  modified_base 8: mod_base = OTHER; note = 2'-O,4'-C-Methyleneguanosine
  modified_base 9: mod_base = OTHER; note = 2'-O,4'-C-Methyleneadenosine
  misc_feature 10..12: note = linked via phosphorothioate
  modified_base 10: mod_base = cm
  modified_base 11: mod_base = um
  modified_base 12: mod_base = gm
  source 1..12: mol_type = other RNA
gaattgtgactg

SEQ ID NO: 694 - RNA, 12 nt, synthetic construct
  misc_feature 1^2: note = linked via phosphorothioate
  modified_base 1: mod_base = OTHER; note = hexadecanamidodiethoxymethanol-adenosine
  modified_base 2: mod_base = OTHER; note = 2'-O,4'-C-Methyleneguanosine
  modified_base 3: mod_base = OTHER; note = 2'-Fluoro-adenosine
  modified_base 4: mod_base = OTHER; note = 2'-Fluoro-adenosine
  modified_base 5: mod_base = OTHER; note = 2'-Fluoro-uridine
  modified_base 6: mod_base = um
  modified_base 7: mod_base = gm
  modified_base 8: mod_base = um
  modified_base 9: mod_base = OTHER; note = 2'-O,4'-C-Methyleneguanosine
  misc_feature 10..12: note = linked via phosphorothioate
  modified_base 10: mod_base = OTHER; note = 2'-O,4'-C-Methyleneadenosine
  modified_base 11: mod_base = cm
  modified_base 12: mod_base = um
  source 1..12: mol_type = other RNA
agaattgtgact

SEQ ID NO: 695 - RNA, 12 nt, synthetic construct
  misc_feature 1^2: note = linked via phosphorothioate
  modified_base 1: mod_base = OTHER; note = hexadecanamidodiethoxymethanol-guanosine
  modified_base 2: mod_base = OTHER; note = 2'-O,4'-C-Methyleneadenosine
  modified_base 3: mod_base = OTHER; note = 2'-Fluoro-guanosine
  modified_base 4: mod_base = OTHER; note = 2'-Fluoro-adenosine
  modified_base 5: mod_base = OTHER; note = 2'-Fluoro-adenosine
  modified_base 6: mod_base = OTHER; note = 2'-Fluoro-uridine
  modified_base 7: mod_base = um
  modified_base 8: mod_base = gm
  modified_base 9: mod_base = um
  misc_feature 10..12: note = linked via phosphorothioate
  modified_base 10: mod_base = OTHER; note = 2'-O,4'-C-Methyleneguanosine
  modified_base 11: mod_base = OTHER; note = 2'-O,4'-C-Methyleneadenosine
  modified_base 12: mod_base = cm
  source 1..12: mol_type = other RNA
gagaattgtgac

SEQ ID NO: 696 - RNA, 12 nt, synthetic construct
  misc_feature 1^2: note = linked via phosphorothioate
  modified_base 1: mod_base = OTHER; note = hexadecanamidodiethoxymethanol-uridine
  modified_base 2: mod_base = OTHER; note = 2'-O,4'-C-Methyleneguanosine
  modified_base 3: mod_base = OTHER; note = 2'-O-methyl-adenosine
  modified_base 4: mod_base = OTHER; note = 2'-Fluoro-guanosine
  modified_base 5: mod_base = OTHER; note = 2'-Fluoro-adenosine
  modified_base 6: mod_base = OTHER; note = 2'-Fluoro-adenosine
  modified_base 7: mod_base = OTHER; note = 2'-Fluoro-uridine
  modified_base 8: mod_base = um
  modified_base 9: mod_base = gm
  misc_feature 10..12: note = linked via phosphorothioate
  modified_base 10: mod_base = um
  modified_base 11: mod_base = OTHER; note = 2'-O,4'-C-Methyleneguanosine
  modified_base 12: mod_base = OTHER; note = 2'-O,4'-C-Methyleneadenosine
  source 1..12: mol_type = other RNA
tgagaattgtga

SEQ ID NO: 697 - DNA, 20 bp, synthetic construct
  misc_feature 1..15: note = RNA fragment
  misc_feature 16: note = DNA fragment
  misc_feature 17..20: note = RNA fragment
  misc_feature 1^2: note = linked via phosphorothioate
  modified_base 1: mod_base = OTHER; note = hexadecanamidodiethoxymethanol-adenosine
  modified_base 2: mod_base = gm
  modified_base 3: mod_base = gm
  modified_base 4: mod_base = OTHER; note = 2'-O-methyl-adenosine
  modified_base 5: mod_base = um
  modified_base 6: mod_base = OTHER; note = 2'-O,4'-C-Methylenecytidine
  modified_base 7: mod_base = um
  modified_base 8: mod_base = OTHER; note = 2'-Fluoro-adenosine
  modified_base 9: mod_base = OTHER; note = 2'-Fluoro-cytidine
  modified_base 10: mod_base = OTHER; note = 2'-Fluoro-uridine
  modified_base 11: mod_base = OTHER; note = 2'-Fluoro-cytidine
  modified_base 12: mod_base = OTHER; note = 2'-O-methyl-adenosine
  modified_base 13: mod_base = OTHER; note = 2'-O-methyl-adenosine
  modified_base 14: mod_base = cm
  modified_base 15: mod_base = OTHER; note = 2'-O,4'-C-Methyleneguanosine
  modified_base 16: mod_base = OTHER; note = 2'-O,4'-C-Methylenethymine
  modified_base 17: mod_base = um
  misc_feature 18..20: note = linked via phosphorothioate
  modified_base 18: mod_base = OTHER; note = 2'-O-methyl-adenosine
  modified_base 19: mod_base = OTHER; note = 2'-O-methyl-adenosine
  modified_base 20: mod_base = OTHER; note = 2'-O-methyl-adenosine
  source 1..20: mol_type = other DNA
aggatctactcaacgttaaa

SEQ ID NO: 698 - RNA, 16 nt, synthetic construct
  misc_feature 1^2: note = linked via phosphorothioate
  modified_base 1: mod_base = OTHER; note = hexadecanamidodiethoxymethanol-uridine
  modified_base 2: mod_base = cm
  modified_base 3: mod_base = um
  modified_base 4: mod_base = OTHER; note = 2'-Fluoro-adenosine
  modified_base 5: mod_base = OTHER; note = 2'-Fluoro-cytidine
  modified_base 6: mod_base = OTHER; note = 2'-Fluoro-uridine
  modified_base 7: mod_base = OTHER; note = 2'-Fluoro-cytidine
  modified_base 8: mod_base = OTHER; note = 2'-O-methyl-adenosine
  modified_base 9: mod_base = OTHER; note = 2'-O-methyl-adenosine
  modified_base 10: mod_base = cm
  modified_base 11: mod_base = gm
  modified_base 12: mod_base = um
  modified_base 13: mod_base = um
  misc_feature 14..16: note = linked via phosphorothioate
  modified_base 14: mod_base = OTHER; note = 2'-O-methyl-adenosine
  modified_base 15: mod_base = OTHER; note = 2'-O-methyl-adenosine
  modified_base 16: mod_base = OTHER; note = 2'-O-methyl-adenosine
  source 1..16: mol_type = other RNA
tctactcaacgttaaa

SEQ ID NO: 699 - RNA, 16 nt, synthetic construct
  misc_feature 1^2: note = linked via phosphorothioate
  modified_base 1: mod_base = um
  modified_base 2: mod_base = cm
  modified_base 3: mod_base = OTHER; note = hexadecanamidodiethoxymethanol-uridine
  modified_base 4: mod_base = OTHER; note = 2'-Fluoro-adenosine
  modified_base 5: mod_base = OTHER; note = 2'-Fluoro-cytidine
  modified_base 6: mod_base = OTHER; note = 2'-Fluoro-uridine
  modified_base 7: mod_base = OTHER; note = 2'-Fluoro-cytidine
  modified_base 8: mod_base = OTHER; note = 2'-O-methyl-adenosine
  modified_base 9: mod_base = OTHER; note = 2'-O-methyl-adenosine
  modified_base 10: mod_base = cm
  modified_base 11: mod_base = gm
  modified_base 12: mod_base = um
  modified_base 13: mod_base = um
  misc_feature 14..16: note = linked via phosphorothioate
  modified_base 14: mod_base = OTHER; note = 2'-O-methyl-adenosine
  modified_base 15: mod_base = OTHER; note = 2'-O-methyl-adenosine
  modified_base 16: mod_base = OTHER; note = 2'-O-methyl-adenosine
  source 1..16: mol_type = other RNA
tctactcaacgttaaa

SEQ ID NO: 700 - RNA, 16 nt, synthetic construct
  misc_feature 1^2: note = linked via phosphorothioate
  modified_base 1: mod_base = um
  modified_base 2: mod_base = cm
  modified_base 3: mod_base = um
  modified_base 4: mod_base = OTHER; note = 2'-Fluoro-adenosine
  modified_base 5: mod_base = OTHER; note = hexadecanamidodiethoxymethanol-cytidine
  modified_base 6: mod_base = OTHER; note = 2'-Fluoro-uridine
  modified_base 7: mod_base = OTHER; note = 2'-Fluoro-cytidine
  modified_base 8: mod_base = OTHER; note = 2'-O-methyl-adenosine
  modified_base 9: mod_base = OTHER; note = 2'-O-methyl-adenosine
  modified_base 10: mod_base = cm
  modified_base 11: mod_base = gm
  modified_base 12: mod_base = um
  modified_base 13: mod_base = um
  misc_feature 14..16: note = linked via phosphorothioate
  modified_base 14: mod_base = OTHER; note = 2'-O-methyl-adenosine
  modified_base 15: mod_base = OTHER; note = 2'-O-methyl-adenosine
  modified_base 16: mod_base = OTHER; note = 2'-O-methyl-adenosine
  source 1..16: mol_type = other RNA
tctactcaacgttaaa

SEQ ID NO: 701 - RNA, 14 nt, synthetic construct
  misc_feature 1^2: note = linked via phosphorothioate
  modified_base 1: mod_base = OTHER; note = hexadecanamidodiethoxymethanol-uridine
  modified_base 2: mod_base = cm
  modified_base 3: mod_base = um
  modified_base 4: mod_base = OTHER; note = 2'-Fluoro-adenosine
  modified_base 5: mod_base = OTHER; note = 2'-Fluoro-cytidine
  modified_base 6: mod_base = OTHER; note = 2'-Fluoro-uridine
  modified_base 7: mod_base = OTHER; note = 2'-Fluoro-cytidine
  modified_base 8: mod_base = OTHER; note = 2'-O-methyl-adenosine
  modified_base 9: mod_base = OTHER; note = 2'-O-methyl-adenosine
  modified_base 10: mod_base = cm
  modified_base 11: mod_base = gm
  misc_feature 12..14: note = linked via phosphorothioate
  modified_base 12: mod_base = um
  modified_base 13: mod_base = um
  modified_base 14: mod_base = OTHER; note = 2'-O-methyl-adenosine
  source 1..14: mol_type = other RNA
tctactcaacgtta

SEQ ID NO: 702 - RNA, 14 nt, synthetic construct
  misc_feature 1^2: note = linked via phosphorothioate
  modified_base 1: mod_base = um
  modified_base 2: mod_base = cm
  modified_base 3: mod_base = OTHER; note = hexadecanamidodiethoxymethanol-uridine
  modified_base 4: mod_base = OTHER; note = 2'-Fluoro-adenosine
  modified_base 5: mod_base = OTHER; note = 2'-Fluoro-cytidine
  modified_base 6: mod_base = OTHER; note = 2'-Fluoro-uridine
  modified_base 7: mod_base = OTHER; note = 2'-Fluoro-cytidine
  modified_base 8: mod_base = OTHER; note = 2'-O-methyl-adenosine
  modified_base 9: mod_base = OTHER; note = 2'-O-methyl-adenosine
  modified_base 10: mod_base = cm
  modified_base 11: mod_base = gm
  misc_feature 12..14: note = linked via phosphorothioate
  modified_base 12: mod_base = um
  modified_base 13: mod_base = um
  modified_base 14: mod_base = OTHER; note = 2'-O-methyl-adenosine
  source 1..14: mol_type = other RNA
tctactcaacgtta

SEQ ID NO: 703 - RNA, 14 nt, synthetic construct
  misc_feature 1^2: note = linked via phosphorothioate
  modified_base 1: mod_base = um
  modified_base 2: mod_base = cm
  modified_base 3: mod_base = um
  modified_base 4: mod_base = OTHER; note = 2'-Fluoro-adenosine
  modified_base 5: mod_base = OTHER; note = hexadecanamidodiethoxymethanol-cytidine
  modified_base 6: mod_base = OTHER; note = 2'-Fluoro-uridine
  modified_base 7: mod_base = OTHER; note = 2'-Fluoro-cytidine
  modified_base 8: mod_base = OTHER; note = 2'-O-methyl-adenosine
  modified_base 9: mod_base = OTHER; note = 2'-O-methyl-adenosine
  modified_base 10: mod_base = cm
  modified_base 11: mod_base = gm
  misc_feature 12..14: note = linked via phosphorothioate
  modified_base 12: mod_base = um
  modified_base 13: mod_base = um
  modified_base 14: mod_base = OTHER; note = 2'-O-methyl-adenosine
  source 1..14: mol_type = other RNA
tctactcaacgtta

SEQ ID NO: 704 - DNA, 16 bp, synthetic construct
  misc_feature 1..11: note = RNA fragment
  misc_feature 12: note = DNA fragment
  misc_feature 13..16: note = RNA fragment
  misc_feature 1^2: note = linked via phosphorothioate
  modified_base 1: mod_base = um
  modified_base 2: mod_base = OTHER; note = 2'-O,4'-C-Methylenecytidine
  modified_base 3: mod_base = OTHER; note = hexadecanamidodiethoxymethanol-uridine
  modified_base 4: mod_base = OTHER; note = 2'-Fluoro-adenosine
  modified_base 5: mod_base = OTHER; note = 2'-Fluoro-cytidine
  modified_base 6: mod_base = OTHER; note = 2'-Fluoro-uridine
  modified_base 7: mod_base = OTHER; note = 2'-Fluoro-cytidine
  modified_base 8: mod_base = OTHER; note = 2'-O-methyl-adenosine
  modified_base 9: mod_base = OTHER; note = 2'-O-methyl-adenosine
  modified_base 10: mod_base = cm
  modified_base 11: mod_base = OTHER; note = 2'-O,4'-C-Methyleneguanosine
  modified_base 12: mod_base = OTHER; note = 2'-O,4'-C-Methylenethymine
  modified_base 13: mod_base = um
  misc_feature 14..16: note = linked via phosphorothioate
  modified_base 14: mod_base = OTHER; note = 2'-O-methyl-adenosine
  modified_base 15: mod_base = OTHER; note = 2'-O-methyl-adenosine
  modified_base 16: mod_base = OTHER; note = 2'-O-methyl-adenosine
  source 1..16: mol_type = other DNA
tctactcaacgttaaa

SEQ ID NO: 705 - DNA, 16 bp, synthetic construct
  misc_feature 1..11: note = RNA fragment
  misc_feature 12: note = DNA fragment
  misc_feature 13..16: note = RNA fragment
  misc_feature 1^2: note = linked via phosphorothioate
  modified_base 1: mod_base = um
  modified_base 2: mod_base = OTHER; note = 2'-O,4'-C-Methylenecytidine
  modified_base 3: mod_base = um
  modified_base 4: mod_base = OTHER; note = 2'-Fluoro-adenosine
  modified_base 5: mod_base = OTHER; note = hexadecanamidodiethoxymethanol-cytidine
  modified_base 6: mod_base = OTHER; note = 2'-Fluoro-uridine
  modified_base 7: mod_base = OTHER; note = 2'-Fluoro-cytidine
  modified_base 8: mod_base = OTHER; note = 2'-O-methyl-adenosine
  modified_base 9: mod_base = OTHER; note = 2'-O-methyl-adenosine
  modified_base 10: mod_base = cm
  modified_base 11: mod_base = OTHER; note = 2'-O,4'-C-Methyleneguanosine
  modified_base 12: mod_base = OTHER; note = 2'-O,4'-C-Methylenethymine
  modified_base 13: mod_base = um
  misc_feature 14..16: note = linked via phosphorothioate
  modified_base 14: mod_base = OTHER; note = 2'-O-methyl-adenosine
  modified_base 15: mod_base = OTHER; note = 2'-O-methyl-adenosine
  modified_base 16: mod_base = OTHER; note = 2'-O-methyl-adenosine
  source 1..16: mol_type = other DNA
tctactcaacgttaaa

SEQ ID NO: 706 - DNA, 14 bp, synthetic construct
  misc_feature 1..11: note = RNA fragment
  misc_feature 12: note = DNA fragment
  misc_feature 13..14: note = RNA fragment
  misc_feature 1^2: note = linked via phosphorothioate
  modified_base 1: mod_base = um
  modified_base 2: mod_base = OTHER; note = 2'-O,4'-C-Methylenecytidine
  modified_base 3: mod_base = OTHER; note = hexadecanamidodiethoxymethanol-uridine
  modified_base 4: mod_base = OTHER; note = 2'-Fluoro-adenosine
  modified_base 5: mod_base = OTHER; note = 2'-Fluoro-cytidine
  modified_base 6: mod_base = OTHER; note = 2'-Fluoro-uridine
  modified_base 7: mod_base = OTHER; note = 2'-Fluoro-cytidine
  modified_base 8: mod_base = OTHER; note = 2'-O-methyl-adenosine
  modified_base 9: mod_base = OTHER; note = 2'-O-methyl-adenosine
  modified_base 10: mod_base = cm
  modified_base 11: mod_base = OTHER; note = 2'-O,4'-C-Methyleneguanosine
  misc_feature 12..14: note = linked via phosphorothioate
  modified_base 12: mod_base = OTHER; note = 2'-O,4'-C-Methylenethymine
  modified_base 13: mod_base = um
  modified_base 14: mod_base = OTHER; note = 2'-O-methyl-adenosine
  source 1..14: mol_type = other DNA
tctactcaacgtta

SEQ ID NO: 707 - DNA, 14 bp, synthetic construct
  misc_feature 1..11: note = RNA fragment
  misc_feature 12: note = DNA fragment
  misc_feature 13..14: note = RNA fragment
  misc_feature 1^2: note = linked via phosphorothioate
  modified_base 1: mod_base = um
  modified_base 2: mod_base = OTHER; note = 2'-O,4'-C-Methylenecytidine
  modified_base 3: mod_base = um
  modified_base 4: mod_base = OTHER; note = 2'-Fluoro-adenosine
  modified_base 5: mod_base = OTHER; note = hexadecanamidodiethoxymethanol-cytidine
  modified_base 6: mod_base = OTHER; note = 2'-Fluoro-uridine
  modified_base 7: mod_base = OTHER; note = 2'-Fluoro-cytidine
  modified_base 8: mod_base = OTHER; note = 2'-O-methyl-adenosine
  modified_base 9: mod_base = OTHER; note = 2'-O-methyl-adenosine
  modified_base 10: mod_base = cm
  modified_base 11: mod_base = OTHER; note = 2'-O,4'-C-Methyleneguanosine
  misc_feature 12..14: note = linked via phosphorothioate
  modified_base 12: mod_base = OTHER; note = 2'-O,4'-C-Methylenethymine
  modified_base 13: mod_base = um
  modified_base 14: mod_base = OTHER; note = 2'-O-methyl-adenosine
  source 1..14: mol_type = other DNA
tctactcaacgtta

SEQ ID NO: 708 - DNA, 20 bp, synthetic construct
  misc_feature 1..15: note = RNA fragment
  misc_feature 16: note = DNA fragment
  misc_feature 17..20: note = RNA fragment
  misc_feature 1^2: note = linked via phosphorothioate
  modified_base 1: mod_base = OTHER; note = hexadecanamidodiethoxymethanol-adenosine
  modified_base 2: mod_base = gm
  modified_base 3: mod_base = gm
  modified_base 4: mod_base = OTHER; note = 2'-O-methyl-adenosine
  modified_base 5: mod_base = um
  modified_base 6: mod_base = cm
  modified_base 7: mod_base = um
  modified_base 8: mod_base = OTHER; note = 2'-O,4'-C-Methyleneadenosine
  modified_base 9: mod_base = OTHER; note = 2'-Fluoro-cytidine
  modified_base 10: mod_base = OTHER; note = 2'-Fluoro-uridine
  modified_base 11: mod_base = OTHER; note = 2'-Fluoro-cytidine
  modified_base 12: mod_base = OTHER; note = 2'-O-methyl-adenosine
  modified_base 13: mod_base = OTHER; note = 2'-O-methyl-adenosine
  modified_base 14: mod_base = cm
  modified_base 15: mod_base = OTHER; note = 2'-O,4'-C-Methyleneguanosine
  modified_base 16: mod_base = OTHER; note = 2'-O,4'-C-Methylenethymine
  modified_base 17: mod_base = um
  misc_feature 18..20: note = linked via phosphorothioate
  modified_base 18: mod_base = OTHER; note = 2'-O-methyl-adenosine
  modified_base 19: mod_base = OTHER; note = 2'-O-methyl-adenosine
  modified_base 20: mod_base = OTHER; note = 2'-O-methyl-adenosine
  source 1..20: mol_type = other DNA
aggatctactcaacgttaaa

SEQ ID NO: 709 - RNA, 14 nt, synthetic construct
  misc_feature 1^2: note = linked via phosphorothioate
  modified_base 1: mod_base = OTHER; note = hexadecanamidodiethoxymethanol-uridine
  modified_base 2: mod_base = OTHER; note = 2'-Fluoro-adenosine
  modified_base 3: mod_base = OTHER; note = 2'-Fluoro-cytidine
  modified_base 4: mod_base = OTHER; note = 2'-Fluoro-uridine
  modified_base 5: mod_base = OTHER; note = 2'-Fluoro-cytidine
  modified_base 6: mod_base = OTHER; note = 2'-O-methyl-adenosine
  modified_base 7: mod_base = OTHER; note = 2'-O-methyl-adenosine
  modified_base 8: mod_base = cm
  modified_base 9: mod_base = gm
  modified_base 10: mod_base = um
  modified_base 11: mod_base = um
  misc_feature 12..14: note = linked via phosphorothioate
  modified_base 12: mod_base = OTHER; note = 2'-O-methyl-adenosine
  modified_base 13: mod_base = OTHER; note = 2'-O-methyl-adenosine
  modified_base 14: mod_base = OTHER; note = 2'-O-methyl-adenosine
  source 1..14: mol_type = other RNA
tactcaacgttaaa

SEQ ID NO: 710 - RNA, 14 nt, synthetic construct
  modified_base 1: mod_base = um
  modified_base 2: mod_base = OTHER; note = 2'-Fluoro-adenosine
  modified_base 3: mod_base = OTHER; note = hexadecanamidodiethoxymethanol-cytidine
  modified_base 4: mod_base = OTHER; note = 2'-Fluoro-uridine
  modified_base 5: mod_base = OTHER; note = 2'-Fluoro-cytidine
  modified_base 6: mod_base = OTHER; note = 2'-O-methyl-adenosine
  modified_base 7: mod_base = OTHER; note = 2'-O-methyl-adenosine
  modified_base 8: mod_base = cm
  modified_base 9: mod_base = gm
  modified_base 10: mod_base = um
  modified_base 11: mod_base = um
  misc_feature 12..14: note = linked via phosphorothioate
  modified_base 12: mod_base = OTHER; note = 2'-O-methyl-adenosine
  modified_base 13: mod_base = OTHER; note = 2'-O-methyl-adenosine
  modified_base 14: mod_base = OTHER; note = 2'-O-methyl-adenosine
  source 1..14: mol_type = other RNA
tactcaacgttaaa

SEQ ID NO: 711 - DNA, 14 bp, synthetic construct
  misc_feature 1..9: note = RNA fragment
  misc_feature 10: note = DNA fragment
  misc_feature 11..14: note = RNA fragment
  misc_feature 1^2: note = linked via phosphorothioate
  modified_base 1: mod_base = um
  modified_base 2: mod_base = OTHER; note = 2'-O,4'-C-Methyleneadenosine
  modified_base 3: mod_base = OTHER; note = hexadecanamidodiethoxymethanol-cytidine
  modified_base 4: mod_base = OTHER; note = 2'-Fluoro-uridine
  modified_base 5: mod_base = OTHER; note = 2'-Fluoro-cytidine
  modified_base 6: mod_base = OTHER; note = 2'-O-methyl-adenosine
  modified_base 7: mod_base = OTHER; note = 2'-O-methyl-adenosine
  modified_base 8: mod_base = cm
  modified_base 9: mod_base = OTHER; note = 2'-O,4'-C-Methyleneguanosine
  modified_base 10: mod_base = OTHER; note = 2'-O,4'-C-Methylenethymine
  modified_base 11: mod_base = um
  misc_feature 12..14: note = linked via phosphorothioate
  modified_base 12: mod_base = OTHER; note = 2'-O-methyl-adenosine
  modified_base 13: mod_base = OTHER; note = 2'-O-methyl-adenosine
  modified_base 14: mod_base = OTHER; note = 2'-O-methyl-adenosine
  source 1..14: mol_type = other DNA
tactcaacgttaaa

SEQ ID NO: 712 - RNA, 12 nt, synthetic construct
  misc_feature 1^2: note = linked via phosphorothioate
  modified_base 1: mod_base = OTHER; note = hexadecanamidodiethoxymethanol-uridine
  modified_base 2: mod_base = OTHER; note = 2'-Fluoro-adenosine
  modified_base 3: mod_base = OTHER; note = 2'-Fluoro-cytidine
  modified_base 4: mod_base = OTHER; note = 2'-Fluoro-uridine
  modified_base 5: mod_base = OTHER; note = 2'-Fluoro-cytidine
  modified_base 6: mod_base = OTHER; note = 2'-O-methyl-adenosine
  modified_base 7: mod_base = OTHER; note = 2'-O-methyl-adenosine
  modified_base 8: mod_base = cm
  modified_base 9: mod_base = gm
  misc_feature 10..12: note = linked via phosphorothioate
  modified_base 10: mod_base = um
  modified_base 11: mod_base = um
  modified_base 12: mod_base = OTHER; note = 2'-O-methyl-adenosine
  source 1..12: mol_type = other RNA
tactcaacgtta

SEQ ID NO: 713 - RNA, 12 nt, synthetic construct
  modified_base 1: mod_base = um
  modified_base 2: mod_base = OTHER; note = 2'-Fluoro-adenosine
  modified_base 3: mod_base = OTHER; note = hexadecanamidodiethoxymethanol-cytidine
  modified_base 4: mod_base = OTHER; note = 2'-Fluoro-uridine
  modified_base 5: mod_base = OTHER; note = 2'-Fluoro-cytidine
  modified_base 6: mod_base = OTHER; note = 2'-O-methyl-adenosine
  modified_base 7: mod_base = OTHER; note = 2'-O-methyl-adenosine
  modified_base 8: mod_base = cm
  modified_base 9: mod_base = gm
  misc_feature 10..12: note = linked via phosphorothioate
  modified_base 10: mod_base = um
  modified_base 11: mod_base = um
  modified_base 12: mod_base = OTHER; note = 2'-O-methyl-adenosine
  source 1..12: mol_type = other RNA
tactcaacgtta

SEQ ID NO: 714 - DNA, 12 bp, synthetic construct
  misc_feature 1..9: note = RNA fragment
  misc_feature 10: note = DNA fragment
  misc_feature 11..12: note = RNA fragment
  misc_feature 1^2: note = linked via phosphorothioate
  modified_base 1: mod_base = um
  modified_base 2: mod_base = OTHER; note = 2'-O,4'-C-Methyleneadenosine
  modified_base 3: mod_base = OTHER; note = hexadecanamidodiethoxymethanol-cytidine
  modified_base 4: mod_base = OTHER; note = 2'-Fluoro-uridine
  modified_base 5: mod_base = OTHER; note = 2'-Fluoro-cytidine
  modified_base 6: mod_base = OTHER; note = 2'-O-methyl-adenosine
  modified_base 7: mod_base = OTHER; note = 2'-O-methyl-adenosine
  modified_base 8: mod_base = cm
  modified_base 9: mod_base = OTHER; note = 2'-O,4'-C-Methyleneguanosine
  misc_feature 10..12: note = linked via phosphorothioate
  modified_base 10: mod_base = OTHER; note = 2'-O,4'-C-Methylenethymine
  modified_base 11: mod_base = um
  modified_base 12: mod_base = OTHER; note = 2'-O-methyl-adenosine
  source 1..12: mol_type = other DNA
tactcaacgtta

SEQ ID NO: 715 - RNA, 20 nt, synthetic construct
  misc_feature 1^2: note = linked via phosphorothioate
  modified_base 1: mod_base = OTHER; note = hexadecanamidodiethoxymethanol-adenosine
  modified_base 2: mod_base = gm
  modified_base 3: mod_base = um
  modified_base 4: mod_base = gm
  modified_base 5: mod_base = um
  modified_base 6: mod_base = OTHER; note = 2'-O,4'-C-Methyleneguanosine
  modified_base 7: mod_base = OTHER; note = 2'-O-methyl-adenosine
  modified_base 8: mod_base = OTHER; note = 2'-Fluoro-guanosine
  modified_base 9: mod_base = OTHER; note = 2'-Fluoro-adenosine
  modified_base 10: mod_base = OTHER; note = 2'-Fluoro-adenosine
  modified_base 11: mod_base = OTHER; note = 2'-Fluoro-uridine
  modified_base 12: mod_base = um
  modified_base 13: mod_base = gm
  modified_base 14: mod_base = um
  modified_base 15: mod_base = OTHER; note = 2'-O,4'-C-Methyleneguanosine
  modified_base 16: mod_base = OTHER; note = 2'-O,4'-C-Methyleneadenosine
  modified_base 17: mod_base = cm
  misc_feature 18..20: note = linked via phosphorothioate
  modified_base 18: mod_base = um
  modified_base 19: mod_base = gm
  modified_base 20: mod_base = OTHER; note = 2'-O-methyl-adenosine
  source 1..20: mol_type = other RNA
agtgtgagaattgtgactga

SEQ ID NO: 716 - RNA, 14 nt, synthetic construct
  misc_feature 1^2: note = linked via phosphorothioate
  modified_base 1: mod_base = OTHER; note = hexadecanamidodiethoxymethanol-uridine
  modified_base 2: mod_base = gm
  modified_base 3: mod_base = OTHER; note = 2'-O-methyl-adenosine
  modified_base 4: mod_base = OTHER; note = 2'-Fluoro-guanosine
  modified_base 5: mod_base = OTHER; note = 2'-Fluoro-adenosine
  modified_base 6: mod_base = OTHER; note = 2'-Fluoro-adenosine
  modified_base 7: mod_base = OTHER; note = 2'-Fluoro-uridine
  modified_base 8: mod_base = um
  modified_base 9: mod_base = gm
  modified_base 10: mod_base = um
  modified_base 11: mod_base = gm
  misc_feature 12..14: note = linked via phosphorothioate
  modified_base 12: mod_base = OTHER; note = 2'-O-methyl-adenosine
  modified_base 13: mod_base = cm
  modified_base 14: mod_base = um
  source 1..14: mol_type = other RNA
tgagaattgtgact

SEQ ID NO: 717 - RNA, 14 nt, synthetic construct
  misc_feature 1^2: note = linked via phosphorothioate
  modified_base 1: mod_base = um
  modified_base 2: mod_base = gm
  modified_base 3: mod_base = OTHER; note = hexadecanamidodiethoxymethanol-adenosine
  modified_base 4: mod_base = OTHER; note = 2'-Fluoro-guanosine
  modified_base 5: mod_base = OTHER; note = 2'-Fluoro-adenosine
  modified_base 6: mod_base = OTHER; note = 2'-Fluoro-adenosine
  modified_base 7: mod_base = OTHER; note = 2'-Fluoro-uridine
  modified_base 8: mod_base = um
  modified_base 9: mod_base = gm
  modified_base 10: mod_base = um
  modified_base 11: mod_base = gm
  misc_feature 12..14: note = linked via phosphorothioate
  modified_base 12: mod_base = OTHER; note = 2'-O-methyl-adenosine
  modified_base 13: mod_base = cm
  modified_base 14: mod_base = um
  source 1..14: mol_type = other RNA
tgagaattgtgact

SEQ ID NO: 718 - RNA, 14 nt, synthetic construct
  misc_feature 1^2: note = linked via phosphorothioate
  modified_base 1: mod_base = um
  modified_base 2: mod_base = gm
  modified_base 3: mod_base = OTHER; note = 2'-O-methyl-adenosine
  modified_base 4: mod_base = OTHER; note = 2'-Fluoro-guanosine
  modified_base 5: mod_base = OTHER; note = hexadecanamidodiethoxymethanol-adenosine
  modified_base 6: mod_base = OTHER; note = 2'-Fluoro-adenosine
  modified_base 7: mod_base = OTHER; note = 2'-Fluoro-uridine
  modified_base 8: mod_base = um
  modified_base 9: mod_base = gm
  modified_base 10: mod_base = um
  modified_base 11: mod_base = gm
  misc_feature 12..14: note = linked via phosphorothioate
  modified_base 12: mod_base = OTHER; note = 2'-O-methyl-adenosine
  modified_base 13: mod_base = cm
  modified_base 14: mod_base = um
  source 1..14: mol_type = other RNA
tgagaattgtgact

SEQ ID NO: 719 - RNA, 16 nt, synthetic construct
  misc_feature 1^2: note = linked via phosphorothioate
  modified_base 1: mod_base = um
  modified_base 2: mod_base = OTHER; note = 2'-O,4'-C-Methyleneguanosine
  modified_base 3: mod_base = OTHER; note = hexadecanamidodiethoxymethanol-adenosine
  modified_base 4: mod_base = OTHER; note = 2'-Fluoro-guanosine
  modified_base 5: mod_base = OTHER; note = 2'-Fluoro-adenosine
  modified_base 6: mod_base = OTHER; note = 2'-Fluoro-adenosine
  modified_base 7: mod_base = OTHER; note = 2'-Fluoro-uridine
  modified_base 8: mod_base = um
  modified_base 9: mod_base = gm
  modified_base 10: mod_base = um
  modified_base 11: mod_base = OTHER; note = 2'-O,4'-C-Methyleneguanosine
  modified_base 12: mod_base = OTHER; note = 2'-O,4'-C-Methyleneadenosine
  modified_base 13: mod_base = cm
  misc_feature 14..16: note = linked via phosphorothioate
  modified_base 14: mod_base = um
  modified_base 15: mod_base = gm
  modified_base 16: mod_base = OTHER; note = 2'-O-methyl-adenosine
  source 1..16: mol_type = other RNA
tgagaattgtgactga

SEQ ID NO: 720 - RNA, 16 nt, synthetic construct
  misc_feature 1^2: note = linked via phosphorothioate
  modified_base 1: mod_base = um
  modified_base 2: mod_base = OTHER; note = 2'-O,4'-C-Methyleneguanosine
  modified_base 3: mod_base = OTHER; note = 2'-O-methyl-adenosine
  modified_base 4: mod_base = OTHER; note = 2'-Fluoro-guanosine
  modified_base 5: mod_base = OTHER; note = hexadecanamidodiethoxymethanol-adenosine
  modified_base 6: mod_base = OTHER; note = 2'-Fluoro-adenosine
  modified_base 7: mod_base = OTHER; note = 2'-Fluoro-uridine
  modified_base 8: mod_base = um
  modified_base 9: mod_base = gm
  modified_base 10: mod_base = um
  modified_base 11: mod_base = OTHER; note = 2'-O,4'-C-Methyleneguanosine
  modified_base 12: mod_base = OTHER; note = 2'-O,4'-C-Methyleneadenosine
  modified_base 13: mod_base = cm
  misc_feature 14..16: note = linked via phosphorothioate
  modified_base 14: mod_base = um
  modified_base 15: mod_base = gm
  modified_base 16: mod_base = OTHER; note = 2'-O-methyl-adenosine
  source 1..16: mol_type = other RNA
tgagaattgtgactga

SEQ ID NO: 721 - RNA, 14 nt, synthetic construct
  misc_feature 1^2: note = linked via phosphorothioate
  modified_base 1: mod_base = um
  modified_base 2: mod_base = OTHER; note = 2'-O,4'-C-Methyleneguanosine
  modified_base 3: mod_base = OTHER; note = hexadecanamidodiethoxymethanol-adenosine
  modified_base 4: mod_base = OTHER; note = 2'-Fluoro-guanosine
  modified_base 5: mod_base = OTHER; note = 2'-Fluoro-adenosine
  modified_base 6: mod_base = OTHER; note = 2'-Fluoro-adenosine
  modified_base 7: mod_base = OTHER; note = 2'-Fluoro-uridine
  modified_base 8: mod_base = um
  modified_base 9: mod_base = gm
  modified_base 10: mod_base = um
  modified_base 11: mod_base = OTHER; note = 2'-O,4'-C-Methyleneguanosine
  misc_feature 12..14: note = linked via phosphorothioate
  modified_base 12: mod_base = OTHER; note = 2'-O,4'-C-Methyleneadenosine
  modified_base 13: mod_base = cm
  modified_base 14: mod_base = um
  source 1..14: mol_type = other RNA
tgagaattgtgact

SEQ ID NO: 722 - RNA, 14 nt, synthetic construct
  misc_feature 1^2: note = linked via phosphorothioate
  modified_base 1: mod_base = um
  modified_base 2: mod_base = OTHER; note = 2'-O,4'-C-Methyleneguanosine
  modified_base 3: mod_base = OTHER; note = 2'-O-methyl-adenosine
  modified_base 4: mod_base = OTHER; note = 2'-Fluoro-guanosine
  modified_base 5: mod_base = OTHER; note = hexadecanamidodiethoxymethanol-adenosine
  modified_base 6: mod_base = OTHER; note = 2'-Fluoro-adenosine
  modified_base 7: mod_base = OTHER; note = 2'-Fluoro-uridine
  modified_base 8: mod_base = um
  modified_base 9: mod_base = gm
  modified_base 10: mod_base = um
  modified_base 11: mod_base = OTHER; note = 2'-O,4'-C-Methyleneguanosine
  misc_feature 12..14: note = linked via phosphorothioate
  modified_base 12: mod_base = OTHER; note = 2'-O,4'-C-Methyleneadenosine
  modified_base 13: mod_base = cm
  modified_base 14: mod_base = um
  source 1..14: mol_type = other RNA
tgagaattgtgact

SEQ ID NO: 723 - RNA, 20 nt, synthetic construct
  misc_feature 1^2: note = linked via phosphorothioate
  modified_base 1: mod_base = OTHER; note = hexadecanamidodiethoxymethanol-adenosine
  modified_base 2: mod_base = gm
  modified_base 3: mod_base = um
  modified_base 4: mod_base = gm
  modified_base 5: mod_base = um
  modified_base 6: mod_base = gm
  modified_base 7: mod_base = OTHER; note = 2'-O-methyl-adenosine
  modified_base 8: mod_base = OTHER; note = 2'-O,4'-C-Methyleneguanosine
  modified_base 9: mod_base = OTHER; note = 2'-Fluoro-adenosine
  modified_base 10: mod_base = OTHER; note = 2'-Fluoro-adenosine
  modified_base 11: mod_base = OTHER; note = 2'-Fluoro-uridine
  modified_base 12: mod_base = um
  modified_base 13: mod_base = gm
  modified_base 14: mod_base = um
  modified_base 15: mod_base = OTHER; note = 2'-O,4'-C-Methyleneguanosine
  modified_base 16: mod_base = OTHER; note = 2'-O,4'-C-Methyleneadenosine
  modified_base 17: mod_base = cm
  misc_feature 18..20: note = linked via phosphorothioate
  modified_base 18: mod_base = um
  modified_base 19: mod_base = gm
  modified_base 20: mod_base = OTHER; note = 2'-O-methyl-adenosine
  source 1..20: mol_type = other RNA
agtgtgagaattgtgactga

SEQ ID NO: 724 - RNA, 14 nt, synthetic construct
  misc_feature 1^2: note = linked via phosphorothioate
  modified_base 1: mod_base = OTHER; note = 2'-O-methyl-adenosine
  modified_base 2: mod_base = OTHER; note = 2'-O,4'-C-Methyleneguanosine
  modified_base 3: mod_base = OTHER; note = hexadecanamidodiethoxymethanol-adenosine
  modified_base 4: mod_base = OTHER; note = 2'-Fluoro-adenosine
  modified_base 5: mod_base = OTHER; note = 2'-Fluoro-uridine
  modified_base 6: mod_base = um
  modified_base 7: mod_base = gm
  modified_base 8: mod_base = um
  modified_base 9: mod_base = OTHER; note = 2'-O,4'-C-Methyleneguanosine
  modified_base 10: mod_base = OTHER; note = 2'-O,4'-C-Methyleneadenosine
  modified_base 11: mod_base = cm
  misc_feature 12..14: note = linked via phosphorothioate
  modified_base 12: mod_base = um
  modified_base 13: mod_base = gm
  modified_base 14: mod_base = OTHER; note = 2'-O-methyl-adenosine
  source 1..14: mol_type = other RNA
agaattgtgactga

SEQ ID NO: 725 - RNA, 12 nt, synthetic construct
  misc_feature 1^2: note = linked via phosphorothioate
  modified_base 1: mod_base = OTHER; note = hexadecanamidodiethoxymethanol-adenosine
  modified_base 2: mod_base = OTHER; note = 2'-Fluoro-guanosine
  modified_base 3: mod_base = OTHER; note = 2'-Fluoro-adenosine
  modified_base 4: mod_base = OTHER; note = 2'-Fluoro-adenosine
  modified_base 5: mod_base = OTHER; note = 2'-Fluoro-uridine
  modified_base 6: mod_base = um
  modified_base 7: mod_base = gm
  modified_base 8: mod_base = um
  modified_base 9: mod_base = gm
  misc_feature 10..12: note = linked via phosphorothioate
  modified_base 10: mod_base = OTHER; note = 2'-O-methyl-adenosine
  modified_base 11: mod_base = cm
  modified_base 12: mod_base = um
  source 1..12: mol_type = other RNA
agaattgtgact

SEQ ID NO: 726 - RNA, 12 nt, synthetic construct
  modified_base 1: mod_base = OTHER; note = 2'-O-methyl-adenosine
  modified_base 2: mod_base = OTHER; note = 2'-Fluoro-guanosine
  modified_base 3: mod_base = OTHER; note = hexadecanamidodiethoxymethanol-adenosine
  modified_base 4: mod_base = OTHER; note = 2'-Fluoro-adenosine
  modified_base 5: mod_base = OTHER; note = 2'-Fluoro-uridine
  modified_base 6: mod_base = um
  modified_base 7: mod_base = gm
  modified_base 8: mod_base = um
  modified_base 9: mod_base = gm
  misc_feature 10..12: note = linked via phosphorothioate
  modified_base 10: mod_base = OTHER; note = 2'-O-methyl-adenosine
  modified_base 11: mod_base = cm
  modified_base 12: mod_base = um
  source 1..12: mol_type = other RNA
agaattgtgact

SEQ ID NO: 727 - RNA, 12 nt, synthetic construct
  misc_feature 1^2: note = linked via phosphorothioate
  modified_base 1: mod_base = OTHER; note = hexadecanamidodiethoxymethanol-adenosine
  modified_base 2: mod_base = OTHER; note = 2'-O,4'-C-Methyleneguanosine
  modified_base 3: mod_base = OTHER; note = 2'-Fluoro-adenosine
  modified_base 4: mod_base = OTHER; note = 2'-Fluoro-adenosine
  modified_base 5: mod_base = OTHER; note = 2'-Fluoro-uridine
  modified_base 6: mod_base = um
  modified_base 7: mod_base = gm
  modified_base 8: mod_base = um
  modified_base 9: mod_base = OTHER; note = 2'-O,4'-C-Methyleneguanosine
  misc_feature 10..12: note = linked via phosphorothioate
  modified_base 10: mod_base = OTHER; note = 2'-O,4'-C-Methyleneadenosine
  modified_base 11: mod_base = cm
  modified_base 12: mod_base = um
  source 1..12: mol_type = other RNA
agaattgtgact

SEQ ID NO: 728 - RNA, 12 nt, synthetic construct
  misc_feature 1^2: note = linked via phosphorothioate
  modified_base 1: mod_base = OTHER; note = 2'-O-methyl-adenosine
  modified_base 2: mod_base = OTHER; note = 2'-O,4'-C-Methyleneguanosine
  modified_base 3: mod_base = OTHER; note = hexadecanamidodiethoxymethanol-adenosine
  modified_base 4: mod_base = OTHER; note = 2'-Fluoro-adenosine
  modified_base 5: mod_base = OTHER; note = 2'-Fluoro-uridine
  modified_base 6: mod_base = um
  modified_base 7: mod_base = gm
  modified_base 8: mod_base = um
  modified_base 9: mod_base = OTHER; note = 2'-O,4'-C-Methyleneguanosine
  misc_feature 10..12: note = linked via phosphorothioate
  modified_base 10: mod_base = OTHER; note = 2'-O,4'-C-Methyleneadenosine
  modified_base 11: mod_base = cm
  modified_base 12: mod_base = um
  source 1..12: mol_type = other RNA
agaattgtgact

SEQ ID NO: 729 - DNA, 20 bp, synthetic construct
  misc_feature 1..13: note = RNA fragment
  misc_feature 14: note = DNA fragment
  misc_feature 15..20: note = RNA fragment
  misc_feature 1^2: note = linked via phosphorothioate
  modified_base 1: mod_base = OTHER; note = hexadecanamidodiethoxymethanol-adenosine
  modified_base 2: mod_base = OTHER; note = 2'-O,4'-C-Methyleneguanosine
  modified_base 3: mod_base = um
  modified_base 4: mod_base = gm
  modified_base 5: mod_base = um
  modified_base 6: mod_base = gm
  modified_base 7: mod_base = OTHER; note = 2'-O-methyl-adenosine
  modified_base 8: mod_base = OTHER; note = 2'-Fluoro-guanosine
  modified_base 9: mod_base = OTHER; note = 2'-Fluoro-adenosine
  modified_base 10: mod_base = OTHER; note = 2'-Fluoro-adenosine
  modified_base 11: mod_base = OTHER; note = 2'-Fluoro-uridine
  modified_base 12: mod_base = um
  modified_base 13: mod_base = gm
  modified_base 14: mod_base = OTHER; note = 2'-O,4'-C-Methylenethymine
  modified_base 15: mod_base = OTHER; note = 2'-O,4'-C-Methyleneguanosine
  modified_base 16: mod_base = OTHER; note = 2'-O-methyl-adenosine
  modified_base 17: mod_base = cm
  misc_feature 18..20: note = linked via phosphorothioate
  modified_base 18: mod_base = um
  modified_base 19: mod_base = gm
  modified_base 20: mod_base = OTHER; note = 2'-O-methyl-adenosine
  source 1..20: mol_type = other DNA
agtgtgagaattgtgactga

SEQ ID NO: 730 - DNA, 20 bp, synthetic construct
  misc_feature 1..13: note = RNA fragment
  misc_feature 14: note = DNA fragment
  misc_feature 15..20: note = RNA fragment
  misc_feature 1^2: note = linked via phosphorothioate
  modified_base 1: mod_base = OTHER; note = hexadecanamidodiethoxymethanol-adenosine
  modified_base 2: mod_base = OTHER; note = 2'-O,4'-C-Methyleneguanosine
  modified_base 3: mod_base = um
  modified_base 4: mod_base = gm
  modified_base 5: mod_base = um
  modified_base 6: mod_base = gm
  modified_base 7: mod_base = OTHER; note = 2'-O-methyl-adenosine
  modified_base 8: mod_base = OTHER; note = 2'-Fluoro-guanosine
  modified_base 9: mod_base = OTHER; note = 2'-Fluoro-adenosine
  modified_base 10: mod_base = OTHER; note = 2'-Fluoro-adenosine
  modified_base 11: mod_base = OTHER; note = 2'-Fluoro-uridine
  modified_base 12: mod_base = um
  modified_base 13: mod_base = OTHER; note = 2'-O,4'-C-Methyleneguanosine
  modified_base 14: mod_base = OTHER; note = 2'-O,4'-C-Methylenethymine
  modified_base 15: mod_base = gm
  modified_base 16: mod_base = OTHER; note = 2'-O-methyl-adenosine
  modified_base 17: mod_base = cm
  misc_feature 18..20: note = linked via phosphorothioate
  modified_base 18: mod_base = um
  modified_base 19: mod_base = gm
  modified_base 20: mod_base = OTHER; note = 2'-O-methyl-adenosine
  source 1..20: mol_type = other DNA
agtgtgagaattgtgactga

SEQ ID NO: 731 - DNA, 10 bp, synthetic construct
  misc_feature 1: note = RNA fragment
  misc_feature 2: note = DNA fragment
  misc_feature 3..10: note = RNA fragment
  misc_feature 1^2: note = linked via phosphorothioate
  modified_base 1: mod_base = OTHER; note = hexadecanamidodiethoxymethanol-uridine
  modified_base 2: mod_base = OTHER; note = 2'-O,4'-C-Methylenethymine
  modified_base 3: mod_base = gm
  modified_base 4: mod_base = um
  modified_base 5: mod_base = OTHER; note = 2'-O,4'-C-Methyleneguanosine
  modified_base 6: mod_base = OTHER; note = 2'-O,4'-C-Methyleneadenosine
  modified_base 7: mod_base = cm
  misc_feature 8..10: note = linked via phosphorothioate
  modified_base 8: mod_base = um
  modified_base 9: mod_base = gm
  modified_base 10: mod_base = OTHER; note = 2'-O-methyl-adenosine
  source 1..10: mol_type = other DNA
ttgtgactga

SEQ ID NO: 732 - DNA, 10 bp, synthetic construct
  misc_feature 1: note = RNA fragment
  misc_feature 2: note = DNA fragment
  misc_feature 3..10: note = RNA fragment
  misc_feature 1^2: note = linked via phosphorothioate
  modified_base 1: mod_base = OTHER; note = hexadecanamidodiethoxymethanol-adenosine
  modified_base 2: mod_base = OTHER; note = 2'-O,4'-C-Methylenethymine
  modified_base 3: mod_base = um
  modified_base 4: mod_base = gm
  modified_base 5: mod_base = um
  modified_base 6: mod_base = OTHER; note = 2'-O,4'-C-Methyleneguanosine
  modified_base 7: mod_base = OTHER; note = 2'-O,4'-C-Methyleneadenosine
  misc_feature 8..10: note = linked via phosphorothioate
  modified_base 8: mod_base = cm
  modified_base 9: mod_base = um
  modified_base 10: mod_base = gm
  source 1..10: mol_type = other DNA
attgtgactg

SEQ ID NO: 733 - RNA, 10 nt, synthetic construct
  misc_feature 1^2: note = linked via phosphorothioate
  modified_base 1: mod_base = OTHER; note = hexadecanamidodiethoxymethanol-adenosine
  modified_base 2: mod_base = OTHER; note = 2'-O,4'-C-Methyleneadenosine
  modified_base 3: mod_base = OTHER; note = 2'-Fluoro-uridine
  modified_base 4: mod_base = um
  modified_base 5: mod_base = gm
  modified_base 6: mod_base = um
  modified_base 7: mod_base = OTHER; note = 2'-O,4'-C-Methyleneguanosine
  misc_feature 8..10: note = linked via phosphorothioate
  modified_base 8: mod_base = OTHER; note = 2'-O,4'-C-Methyleneadenosine
  modified_base 9: mod_base = cm
  modified_base 10: mod_base = um
  source 1..10: mol_type = other RNA
aattgtgact

SEQ ID NO: 734 - RNA, 10 nt, synthetic construct
  misc_feature 1^2: note = linked via phosphorothioate
  modified_base 1: mod_base = OTHER; note = hexadecanamidodiethoxymethanol-guanosine
  modified_base 2: mod_base = OTHER; note = 2'-O,4'-C-Methyleneadenosine
  modified_base 3: mod_base = OTHER; note = 2'-Fluoro-adenosine
  modified_base 4: mod_base = OTHER; note = 2'-Fluoro-uridine
  modified_base 5: mod_base = um
  modified_base 6: mod_base = gm
  modified_base 7: mod_base = um
  misc_feature 8..10: note = linked via phosphorothioate
  modified_base 8: mod_base = OTHER; note = 2'-O,4'-C-Methyleneguanosine
  modified_base 9: mod_base = OTHER; note = 2'-O,4'-C-Methyleneadenosine
  modified_base 10: mod_base = cm
  source 1..10: mol_type = other RNA
gaattgtgac

SEQ ID NO: 735 - RNA, 10 nt, synthetic construct
  misc_feature 1^2: note = linked via phosphorothioate
  modified_base 1: mod_base = OTHER; note = hexadecanamidodiethoxymethanol-adenosine
  modified_base 2: mod_base = OTHER; note = 2'-O,4'-C-Methyleneguanosine
  modified_base 3: mod_base = OTHER; note = 2'-Fluoro-adenosine
  modified_base 4: mod_base = OTHER; note = 2'-Fluoro-adenosine
  modified_base 5: mod_base = OTHER; note = 2'-Fluoro-uridine
  modified_base 6: mod_base = um
  modified_base 7: mod_base = gm
  misc_feature 8..10: note = linked via phosphorothioate
  modified_base 8: mod_base = um
  modified_base 9: mod_base = OTHER; note = 2'-O,4'-C-Methyleneguanosine
  modified_base 10: mod_base = OTHER; note = 2'-O,4'-C-Methyleneadenosine
  source 1..10: mol_type = other RNA
agaattgtga

SEQ ID NO: 736 - DNA, 10 bp, synthetic construct
  misc_feature 1..8: note = RNA fragment
  misc_feature 9: note = DNA fragment
  misc_feature 10: note = RNA fragment
  misc_feature 1^2: note = linked via phosphorothioate
  modified_base 1: mod_base = OTHER; note = hexadecanamidodiethoxymethanol-guanosine
  modified_base 2: mod_base = OTHER; note = 2'-O,4'-C-Methyleneadenosine
  modified_base 3: mod_base = OTHER; note = 2'-Fluoro-guanosine
  modified_base 4: mod_base = OTHER; note = 2'-Fluoro-adenosine
  modified_base 5: mod_base = OTHER; note = 2'-Fluoro-adenosine
  modified_base 6: mod_base = OTHER; note = 2'-Fluoro-uridine
  modified_base 7: mod_base = um
  misc_feature 8..10: note = linked via phosphorothioate
  modified_base 8: mod_base = gm
  modified_base 9: mod_base = OTHER; note = 2'-O,4'-C-Methylenethymine
  modified_base 10: mod_base = OTHER; note = 2'-O,4'-C-Methyleneguanosine
  source 1..10: mol_type = other DNA
gagaattgtg

SEQ ID NO: 737 - DNA, 10 bp, synthetic construct
  misc_feature 1..9: note = RNA fragment
  misc_feature 10: note = DNA fragment
  misc_feature 1^2: note = linked via phosphorothioate
  modified_base 1: mod_base = OTHER; note = hexadecanamidodiethoxymethanol-uridine
  modified_base 2: mod_base = OTHER; note = 2'-O,4'-C-Methyleneguanosine
  modified_base 3: mod_base = OTHER; note = 2'-O-methyl-adenosine
  modified_base 4: mod_base = OTHER; note = 2'-Fluoro-guanosine
  modified_base 5: mod_base = OTHER; note = 2'-Fluoro-adenosine
  modified_base 6: mod_base = OTHER; note = 2'-Fluoro-adenosine
  modified_base 7: mod_base = OTHER; note = 2'-Fluoro-uridine
  misc_feature 8..10: note = linked via phosphorothioate
  modified_base 8: mod_base = um
  modified_base 9: mod_base = OTHER; note = 2'-O,4'-C-Methyleneguanosine
  modified_base 10: mod_base = OTHER; note = 2'-O,4'-C-Methylenethymine
  source 1..10: mol_type = other DNA
tgagaattgt

SEQ ID NO: 738 - RNA, 17 nt, synthetic construct
  source 1..17: mol_type = other RNA
caattatgtttgaaagc

SEQ ID NO: 739 - RNA, 11 nt, synthetic construct
  source 1..11: mol_type = other RNA
tgtttgaaagc

SEQ ID NO: 740 - RNA, 17 nt, synthetic construct
  misc_feature 1^2: note = linked via phosphorothioate
  modified_base 1: mod_base = OTHER; note = hexadecanamidodiethoxymethanol-cytidine
  modified_base 2: mod_base = OTHER; note = 2'-O-methyl-adenosine
  modified_base 3: mod_base = OTHER; note = 2'-O-methyl-adenosine
  modified_base 4: mod_base = um
  modified_base 5: mod_base = um
  modified_base 6: mod_base = OTHER; note = 2'-O-methyl-adenosine
  modified_base 7: mod_base = um
  modified_base 8: mod_base = OTHER; note = 2'-Fluoro-guanosine
  modified_base 9: mod_base = OTHER; note = 2'-Fluoro-uridine
  modified_base 10: mod_base = OTHER; note = 2'-Fluoro-uridine
  modified_base 11: mod_base = OTHER; note = 2'-Fluoro-uridine
  modified_base 12: mod_base = gm
  modified_base 13: mod_base = OTHER; note = 2'-O-methyl-adenosine
  modified_base 14: mod_base = OTHER; note = 2'-O-methyl-adenosine
  misc_feature 15..17: note = linked via phosphorothioate
  modified_base 15: mod_base = OTHER; note = 2'-O-methyl-adenosine
  modified_base 16: mod_base = gm
  modified_base 17: mod_base = cm
  source 1..17: mol_type = other RNA
caattatgtttgaaagc

SEQ ID NO: 741 - RNA, 11 nt, synthetic construct
  misc_feature 1^2: note = linked via phosphorothioate
  modified_base 1: mod_base = OTHER; note = hexadecanamidodiethoxymethanol-uridine
  modified_base 2: mod_base = OTHER; note = 2'-O,4'-C-Methyleneguanosine
  modified_base 3: mod_base = OTHER; note = 2'-Fluoro-uridine
  modified_base 4: mod_base = OTHER; note = 2'-Fluoro-uridine
  modified_base 5: mod_base = OTHER; note = 2'-Fluoro-uridine
  modified_base 6: mod_base = gm
  modified_base 7: mod_base = OTHER; note = 2'-O-methyl-adenosine
  modified_base 8: mod_base = OTHER; note = 2'-O-methyl-adenosine
  misc_feature 9..11: note = linked via phosphorothioate
  modified_base 9: mod_base = OTHER; note = 2'-O-methyl-adenosine
  modified_base 10: mod_base = gm
  modified_base 11: mod_base = cm
  source 1..11: mol_type = other RNA
tgtttgaaagc

SEQ ID NO: 742 - RNA, 20 nt, synthetic construct
  source 1..20: mol_type = other RNA
ggtggatgaaactcagttta

SEQ ID NO: 743 - RNA, 19 nt, synthetic construct
  source 1..19: mol_type = other RNA
ggtggatgaaactcagttt

SEQ ID NO: 744 - RNA, 18 nt, synthetic construct
  source 1..18: mol_type = other RNA
ggtggatgaaactcagtt

SEQ ID NO: 745 - RNA, 17 nt, synthetic construct
  source 1..17: mol_type = other RNA
ggtggatgaaactcagt

SEQ ID NO: 746 - RNA, 16 nt, synthetic construct
  source 1..16: mol_type = other RNA
ggtggatgaaactcag

SEQ ID NO: 747 - RNA, 20 nt, synthetic construct
  misc_feature 1^2: note = linked via phosphorothioate
  modified_base 1: mod_base = OTHER; note = docosanamidodiethoxymethanol-guanosine
  modified_base 2: mod_base = gm
  modified_base 3: mod_base = um
  modified_base 4: mod_base = gm
  modified_base 5: mod_base = gm
  modified_base 6: mod_base = OTHER; note = 2'-O-methyl-adenosine
  modified_base 7: mod_base = um
  modified_base 8: mod_base = OTHER; note = 2'-Fluoro-guanosine
  modified_base 9: mod_base = OTHER; note = 2'-Fluoro-adenosine
  modified_base 10: mod_base = OTHER; note = 2'-Fluoro-adenosine
  modified_base 11: mod_base = OTHER; note = 2'-Fluoro-adenosine
  modified_base 12: mod_base = cm
  modified_base 13: mod_base = um
  modified_base 14: mod_base = cm
  modified_base 15: mod_base = OTHER; note = 2'-O-methyl-adenosine
  modified_base 16: mod_base = gm
  modified_base 17: mod_base = um
  misc_feature 18..20: note = linked via phosphorothioate
  modified_base 18: mod_base = um
  modified_base 19: mod_base = um
  modified_base 20: mod_base = OTHER; note = 2'-O-methyl-adenosine
  source 1..20: mol_type = other RNA
ggtggatgaaactcagttta

SEQ ID NO: 748 - RNA, 19 nt, synthetic construct
  misc_feature 1^2: note = linked via phosphorothioate
  modified_base 1: mod_base = OTHER; note = docosanamidodiethoxymethanol-guanosine
  modified_base 2: mod_base = gm
  modified_base 3: mod_base = um
  modified_base 4: mod_base = gm
  modified_base 5: mod_base = gm
  modified_base 6: mod_base = OTHER; note = 2'-O-methyl-adenosine
  modified_base 7: mod_base = um
  modified_base 8: mod_base = OTHER; note = 2'-Fluoro-guanosine
  modified_base 9: mod_base = OTHER; note = 2'-Fluoro-adenosine
  modified_base 10: mod_base = OTHER; note = 2'-Fluoro-adenosine
  modified_base 11: mod_base = OTHER; note = 2'-Fluoro-adenosine
  modified_base 12: mod_base = cm
  modified_base 13: mod_base = um
  modified_base 14: mod_base = cm
  modified_base 15: mod_base = OTHER; note = 2'-O-methyl-adenosine
  modified_base 16: mod_base = gm
  misc_feature 17..19: note = linked via phosphorothioate
  modified_base 17: mod_base = um
  modified_base 18: mod_base = um
  modified_base 19: mod_base = um
  source 1..19: mol_type = other RNA
ggtggatgaaactcagttt

SEQ ID NO: 749 - RNA, 18 nt, synthetic construct
  misc_feature 1^2: note = linked via phosphorothioate
  modified_base 1: mod_base = OTHER; note = docosanamidodiethoxymethanol-guanosine
  modified_base 2: mod_base = gm
  modified_base 3: mod_base = um
  modified_base 4: mod_base = gm
  modified_base 5: mod_base = gm
  modified_base 6: mod_base = OTHER; note = 2'-O-methyl-adenosine
  modified_base 7: mod_base = um
  modified_base 8: mod_base = OTHER; note = 2'-Fluoro-guanosine
  modified_base 9: mod_base = OTHER; note = 2'-Fluoro-adenosine
  modified_base 10: mod_base = OTHER; note = 2'-Fluoro-adenosine
  modified_base 11: mod_base = OTHER; note = 2'-Fluoro-adenosine
  modified_base 12: mod_base = cm
  modified_base 13: mod_base = um
  modified_base 14: mod_base = cm
  modified_base 15: mod_base = OTHER; note = 2'-O-methyl-adenosine
  misc_feature 16..18: note = linked via phosphorothioate
  modified_base 16: mod_base = gm
  modified_base 17: mod_base = um
  modified_base 18: mod_base = um
  source 1..18: mol_type = other RNA
ggtggatgaaactcagtt

SEQ ID NO: 750 - RNA, 17 nt, synthetic construct
  misc_feature 1^2: note = linked via phosphorothioate
  modified_base 1: mod_base = OTHER; note = docosanamidodiethoxymethanol-guanosine
  modified_base 2: mod_base = gm
  modified_base 3: mod_base = um
  modified_base 4: mod_base = gm
  modified_base 5: mod_base = gm
  modified_base 6: mod_base = OTHER; note = 2'-O-methyl-adenosine
  modified_base 7: mod_base = um
  modified_base 8: mod_base = OTHER; note = 2'-Fluoro-guanosine
  modified_base 9: mod_base = OTHER; note = 2'-Fluoro-adenosine
  modified_base 10: mod_base = OTHER; note = 2'-Fluoro-adenosine
  modified_base 11: mod_base = OTHER; note = 2'-Fluoro-adenosine
  modified_base 12: mod_base = cm
  modified_base 13: mod_base = um
  modified_base 14: mod_base = cm
  misc_feature 15..17: note = linked via phosphorothioate
  modified_base 15: mod_base = OTHER; note = 2'-O-methyl-adenosine
  modified_base 16: mod_base = gm
  modified_base 17: mod_base = um
  source 1..17: mol_type = other RNA
ggtggatgaaactcagt

SEQ ID NO: 751 - RNA, 16 nt, synthetic construct
  misc_feature 1^2: note = linked via phosphorothioate
  modified_base 1: mod_base = OTHER; note = docosanamidodiethoxymethanol-guanosine
  modified_base 2: mod_base = gm
  modified_base 3: mod_base = um
  modified_base 4: mod_base = gm
  modified_base 5: mod_base = gm
  modified_base 6: mod_base = OTHER; note = 2'-O-methyl-adenosine
  modified_base 7: mod_base = um
  modified_base 8: mod_base = OTHER; note = 2'-Fluoro-guanosine
  modified_base 9: mod_base = OTHER; note = 2'-Fluoro-adenosine
  modified_base 10: mod_base = OTHER; note = 2'-Fluoro-adenosine
  modified_base 11: mod_base = OTHER; note = 2'-Fluoro-adenosine
  modified_base 12: mod_base = cm
  modified_base 13: mod_base = um
  misc_feature 14..16: note = linked via phosphorothioate
  modified_base 14: mod_base = cm
  modified_base 15: mod_base = OTHER; note = 2'-O-methyl-adenosine
  modified_base 16: mod_base = gm
  source 1..16: mol_type = other RNA
ggtggatgaaactcag

SEQ ID NO: 752 - RNA, 22 nt, synthetic construct
  misc_feature 1..4: note = linked via phosphorothioate
  modified_base 1: mod_base = OTHER; note = 4'-O-monomethylphosphonate-2'-O-methylmethyluridine
  modified_base 2: mod_base = OTHER; note = 2'-Fluoro-adenosine
  modified_base 3: mod_base = OTHER; note = 2'-Fluoro-adenosine
  modified_base 4: mod_base = OTHER; note = 2'-Fluoro-adenosine
  modified_base 5: mod_base = OTHER; note = 2'-Fluoro-cytidine
  modified_base 6: mod_base = um
  modified_base 7: mod_base = OTHER; note = 2'-Fluoro-guanosine
  modified_base 8: mod_base = OTHER; note = 2'-O-methyl-adenosine
  modified_base 9: mod_base = gm
  modified_base 10: mod_base = OTHER; note = 2'-Fluoro-uridine
  modified_base 11: mod_base = um
  modified_base 12: mod_base = um
  modified_base 13: mod_base = cm
  modified_base 14: mod_base = OTHER; note = 2'-Fluoro-adenosine
  modified_base 15: mod_base = um
  modified_base 16: mod_base = cm
  modified_base 17: mod_base = cm
  modified_base 18: mod_base = OTHER; note = 2'-O-methyl-adenosine
  modified_base 19: mod_base = cm
  misc_feature 20..22: note = linked via phosphorothioate
  modified_base 20: mod_base = cm
  modified_base 21: mod_base = gm
  modified_base 22: mod_base = gm
  source 1..22: mol_type = other RNA
taaactgagtttcatccaccgg

SEQ ID NO: 753 - RNA, 22 nt, synthetic construct
  misc_feature 1..5: note = linked via phosphorothioate
  modified_base 1: mod_base = OTHER; note = 4'-O-monomethylphosphonate-2'-O-methylmethyluridine
  modified_base 2: mod_base = OTHER; note = 2'-Fluoro-adenosine
  modified_base 3: mod_base = OTHER; note = 2'-Fluoro-adenosine
  modified_base 4: mod_base = OTHER; note = 2'-Fluoro-adenosine
  modified_base 5: mod_base = OTHER; note = 2'-Fluoro-cytidine
  modified_base 6: mod_base = um
  modified_base 7: mod_base = OTHER; note = 2'-Fluoro-guanosine
  modified_base 8: mod_base = OTHER; note = 2'-O-methyl-adenosine
  modified_base 9: mod_base = gm
  modified_base 10: mod_base = OTHER; note = 2'-Fluoro-uridine
  modified_base 11: mod_base = um
  modified_base 12: mod_base = um
  modified_base 13: mod_base = cm
  modified_base 14: mod_base = OTHER; note = 2'-Fluoro-adenosine
  modified_base 15: mod_base = um
  modified_base 16: mod_base = cm
  modified_base 17: mod_base = cm
  modified_base 18: mod_base = OTHER; note = 2'-O-methyl-adenosine
  modified_base 19: mod_base = cm
  misc_feature 20..22: note = linked via phosphorothioate
  modified_base 20: mod_base = cm
  modified_base 21: mod_base = gm
  modified_base 22: mod_base = gm
  source 1..22: mol_type = other RNA
taaactgagtttcatccaccgg

SEQ ID NO: 754 - RNA, 19 nt, synthetic construct
  source 1..19: mol_type = other RNA
aggatctactcaacgttaa

SEQ ID NO: 755 - RNA, 19 nt, synthetic construct
  source 1..19: mol_type = other RNA
ttaacgttgagtagatcct

SEQ ID NO: 756 - RNA, 36 nt, synthetic construct; identical to SEQ ID NO: 582
  source 1..36: mol_type = other RNA

SEQ ID NO: 757 - RNA, 22 nt, synthetic construct
  source 1..22: mol_type = other RNA
tttaacgttgagtagatcctgg

SEQ ID NO: 758 - RNA, 36 nt, synthetic construct; identical to SEQ ID NO: 582
  misc_feature 1^2: note = linked via phosphorothioate
  modified_base 1: mod_base = OTHER; note = 2'-O-methyl-adenosine
  modified_base 2: mod_base = gm
  modified_base 3: mod_base = gm
  modified_base 4: mod_base = OTHER; note = 2'-O-methyl-adenosine
  modified_base 5: mod_base = um
  modified_base 6: mod_base = cm
  modified_base 7: mod_base = um
  modified_base 8: mod_base = OTHER; note = 2'-Fluoro-adenosine
  modified_base 9: mod_base = OTHER; note = 2'-Fluoro-cytidine
  modified_base 10: mod_base = OTHER; note = 2'-Fluoro-uridine
  modified_base 11: mod_base = OTHER; note = 2'-Fluoro-cytidine
  modified_base 12: mod_base = OTHER; note = 2'-O-methyl-adenosine
  modified_base 13: mod_base = OTHER; note = 2'-O-methyl-adenosine
  modified_base 14: mod_base = cm
  modified_base 15: mod_base = gm
  modified_base 16: mod_base = um
  modified_base 17: mod_base = um
  modified_base 18: mod_base = OTHER; note = 2'-O-methyl-adenosine
  modified_base 19: mod_base = OTHER; note = 2'-O-methyl-adenosine
  modified_base 20: mod_base = OTHER; note = 2'-O-methyl-adenosine
  modified_base 21: mod_base = gm
  modified_base 22: mod_base = cm
  modified_base 23: mod_base = OTHER; note = 2'-O-methyl-adenosine
  modified_base 24: mod_base = gm
  modified_base 25: mod_base = cm
  modified_base 26: mod_base = cm
  modified_base 27: mod_base = gm
  modified_base 28: mod_base = OTHER; note = aminodiethoxymethanol-adenosine-N-acetylgalactosamine
  modified_base 29: mod_base = OTHER; note = aminodiethoxymethanol-adenosine-N-acetylgalactosamine
  modified_base 30: mod_base = OTHER; note = aminodiethoxymethanol-adenosine-N-acetylgalactosamine
  modified_base 31: mod_base = gm
  modified_base 32: mod_base = gm
  modified_base 33: mod_base = cm
  modified_base 34: mod_base = um
  modified_base 35: mod_base = gm
  modified_base 36: mod_base = cm
  source 1..36: mol_type = other RNA

SEQ ID NO: 759 - RNA, 36 nt, synthetic construct; identical to SEQ ID NO: 582
  misc_feature 1^2: note = linked via phosphorothioate
  modified_base 1: mod_base = OTHER; note = hexadecanamidodiethoxymethanol-adenosine
  modified_base 2: mod_base = gm
  modified_base 3: mod_base = gm
  modified_base 4: mod_base = OTHER; note = 2'-O-methyl-adenosine
  modified_base 5: mod_base = um
  modified_base 6: mod_base = cm
  modified_base 7: mod_base = um
  modified_base 8: mod_base = OTHER; note = 2'-Fluoro-adenosine
  modified_base 9: mod_base = OTHER; note = 2'-Fluoro-cytidine
  modified_base 10: mod_base = OTHER; note = 2'-Fluoro-uridine
  modified_base 11: mod_base = OTHER; note = 2'-Fluoro-cytidine
  modified_base 12: mod_base = OTHER; note = 2'-O-methyl-adenosine
  modified_base 13: mod_base = OTHER; note = 2'-O-methyl-adenosine
  modified_base 14: mod_base = cm
  modified_base 15: mod_base = gm
  modified_base 16: mod_base = um
  modified_base 17: mod_base = um
  modified_base 18: mod_base = OTHER; note = 2'-O-methyl-adenosine
  modified_base 19: mod_base = OTHER; note = 2'-O-methyl-adenosine
  modified_base 20: mod_base = OTHER; note = 2'-O-methyl-adenosine
  modified_base 21: mod_base = gm
  modified_base 22: mod_base = cm
  modified_base 23: mod_base = OTHER; note = 2'-O-methyl-adenosine
  modified_base 24: mod_base = gm
  modified_base 25: mod_base = cm
  modified_base 26: mod_base = cm
  modified_base 27: mod_base = gm
  modified_base 28: mod_base = OTHER; note = 2'-O-methyl-adenosine
  modified_base 29: mod_base = OTHER; note = 2'-O-methyl-adenosine
  modified_base 30: mod_base = OTHER; note = 2'-O-methyl-adenosine
  modified_base 31: mod_base = gm
  modified_base 32: mod_base = gm
  modified_base 33: mod_base = cm
  modified_base 34: mod_base = um
  modified_base 35: mod_base = gm
  modified_base 36: mod_base = cm
  source 1..36: mol_type = other RNA

SEQ ID NO: 760 - RNA, 36 nt, synthetic construct; identical to SEQ ID NO: 582
  misc_feature 1^2: note = linked via phosphorothioate
  modified_base 1: mod_base = OTHER; note = 2'-O-methyl-adenosine
  modified_base 2: mod_base = gm
  modified_base 3: mod_base = gm
  modified_base 4: mod_base = OTHER; note = hexadecanamidodiethoxymethanol-adenosine
  modified_base 5: mod_base = um
  modified_base 6: mod_base = cm
  modified_base 7: mod_base = um
  modified_base 8: mod_base = OTHER; note = 2'-Fluoro-adenosine
  modified_base 9: mod_base = OTHER; note = 2'-Fluoro-cytidine
  modified_base 10: mod_base = OTHER; note = 2'-Fluoro-uridine
  modified_base 11: mod_base = OTHER; note = 2'-Fluoro-cytidine
  modified_base 12: mod_base = OTHER; note = 2'-O-methyl-adenosine
  modified_base 13: mod_base = OTHER; note = 2'-O-methyl-adenosine
  modified_base 14: mod_base = cm
  modified_base 15: mod_base = gm
  modified_base 16: mod_base = um
  modified_base 17: mod_base = um
  modified_base 18: mod_base = OTHER; note = 2'-O-methyl-adenosine
  modified_base 19: mod_base = OTHER; note = 2'-O-methyl-adenosine
  modified_base 20: mod_base = OTHER; note = 2'-O-methyl-adenosine
  modified_base 21: mod_base = gm
  modified_base 22: mod_base = cm
  modified_base 23: mod_base = OTHER; note = 2'-O-methyl-adenosine
  modified_base 24: mod_base = gm
  modified_base 25: mod_base = cm
  modified_base 26: mod_base = cm
  modified_base 27: mod_base = gm
  modified_base 28: mod_base = OTHER; note = 2'-O-methyl-adenosine
  modified_base 29: mod_base = OTHER; note = 2'-O-methyl-adenosine
  modified_base 30: mod_base = OTHER; note = 2'-O-methyl-adenosine
  modified_base 31: mod_base = gm
  modified_base 32: mod_base = gm
  modified_base 33: mod_base = cm
  modified_base 34: mod_base = um
  modified_base 35: mod_base = gm
  modified_base 36: mod_base = cm
  source 1..36: mol_type = other RNA

SEQ ID NO: 761 - RNA, 36 nt, synthetic construct; identical to SEQ ID NO: 582
  misc_feature 1^2: note = linked via phosphorothioate
  modified_base 1: mod_base = OTHER; note = 2'-O-methyl-adenosine
  modified_base 2: mod_base = gm
  modified_base 3: mod_base = gm
  modified_base 4: mod_base = OTHER; note = 2'-O-methyl-adenosine
  modified_base 5: mod_base = um
  modified_base 6: mod_base = cm
  modified_base 7: mod_base = um
  modified_base 8: mod_base = OTHER; note = hexadecanamidodiethoxymethanol-adenosine
  modified_base 9: mod_base = OTHER; note = 2'-Fluoro-cytidine
  modified_base 10: mod_base = OTHER; note = 2'-Fluoro-uridine
  modified_base 11: mod_base = OTHER; note = 2'-Fluoro-cytidine
  modified_base 12: mod_base = OTHER; note = 2'-O-methyl-adenosine
  modified_base 13: mod_base = OTHER; note = 2'-O-methyl-adenosine
  modified_base 14: mod_base = cm
  modified_base 15: mod_base = gm
  modified_base 16: mod_base = um
  modified_base 17: mod_base = um
  modified_base 18: mod_base = OTHER; note = 2'-O-methyl-adenosine
  modified_base 19: mod_base = OTHER; note = 2'-O-methyl-adenosine
  modified_base 20: mod_base = OTHER; note = 2'-O-methyl-adenosine
  modified_base 21: mod_base = gm
  modified_base 22: mod_base = cm
  modified_base 23: mod_base = OTHER; note = 2'-O-methyl-adenosine
  modified_base 24: mod_base = gm
  modified_base 25: mod_base = cm
  modified_base 26: mod_base = cm
  modified_base 27: mod_base = gm
  modified_base 28: mod_base = OTHER; note = 2'-O-methyl-adenosine
  modified_base 29: mod_base = OTHER; note = 2'-O-methyl-adenosine
  modified_base 30: mod_base = OTHER; note = 2'-O-methyl-adenosine
  modified_base 31: mod_base = gm
  modified_base 32: mod_base = gm
  modified_base 33: mod_base = cm
  modified_base 34: mod_base = um
  modified_base 35: mod_base = gm
  modified_base 36: mod_base = cm
  source 1..36: mol_type = other RNA

SEQ ID NO: 762 - RNA, 36 nt, synthetic construct; identical to SEQ ID NO: 582
  misc_feature 1^2: note = linked via phosphorothioate
  modified_base 1: mod_base = OTHER; note = 2'-O-methyl-adenosine
  modified_base 2: mod_base = gm
  modified_base 3: mod_base = gm
  modified_base 4: mod_base = OTHER; note = 2'-O-methyl-adenosine
  modified_base 5: mod_base = um
  modified_base 6: mod_base = cm
  modified_base 7: mod_base = um
  modified_base 8: mod_base = OTHER; note = 2'-Fluoro-adenosine
  modified_base 9: mod_base = OTHER; note = 2'-Fluoro-cytidine
  modified_base 10: mod_base = OTHER; note = 2'-Fluoro-uridine
  modified_base 11: mod_base = OTHER; note = 2'-Fluoro-cytidine
  modified_base 12: mod_base = OTHER; note = hexadecanamidodiethoxymethanol-adenosine
  modified_base 13: mod_base = OTHER; note = 2'-O-methyl-adenosine
  modified_base 14: mod_base = cm
  modified_base 15: mod_base = gm
  modified_base 16: mod_base = um
  modified_base 17: mod_base = um
  modified_base 18: mod_base = OTHER; note = 2'-O-methyl-adenosine
  modified_base 19: mod_base = OTHER; note = 2'-O-methyl-adenosine
  modified_base 20: mod_base = OTHER; note = 2'-O-methyl-adenosine
  modified_base 21: mod_base = gm
  modified_base 22: mod_base = cm
  modified_base 23: mod_base = OTHER; note = 2'-O-methyl-adenosine
  modified_base 24: mod_base = gm
  modified_base 25: mod_base = cm
  modified_base 26: mod_base = cm
  modified_base 27: mod_base = gm
  modified_base 28: mod_base = OTHER; note = 2'-O-methyl-adenosine
  modified_base 29: mod_base = OTHER; note = 2'-O-methyl-adenosine
  modified_base 30: mod_base = OTHER; note = 2'-O-methyl-adenosine
  modified_base 31: mod_base = gm
  modified_base 32: mod_base = gm
  modified_base 33: mod_base = cm
  modified_base 34: mod_base = um
  modified_base 35: mod_base = gm
  modified_base 36: mod_base = cm
  source 1..36: mol_type = other RNA

SEQ ID NO: 763 - RNA, 36 nt, synthetic construct; identical to SEQ ID NO: 582
  misc_feature 1^2: note = linked via phosphorothioate
  modified_base 1: mod_base = OTHER; note = 2'-O-methyl-adenosine
  modified_base 2: mod_base = gm
  modified_base 3: mod_base = gm
  modified_base 4: mod_base = OTHER; note = 2'-O-methyl-adenosine
  modified_base 5: mod_base = um
  modified_base 6: mod_base = cm
  modified_base 7: mod_base = um
  modified_base 8: mod_base = OTHER; note = 2'-Fluoro-adenosine
  modified_base 9: mod_base = OTHER; note = 2'-Fluoro-cytidine
  modified_base 10: mod_base = OTHER; note = 2'-Fluoro-uridine
  modified_base 11: mod_base = OTHER; note = 2'-Fluoro-cytidine
  modified_base 12: mod_base = OTHER; note = 2'-O-methyl-adenosine
  modified_base 13: mod_base = OTHER; note = hexadecanamidodiethoxymethanol-adenosine
  modified_base 14: mod_base = cm
  modified_base 15: mod_base = gm
  modified_base 16: mod_base = um
  modified_base 17: mod_base = um
  modified_base 18: mod_base = OTHER; note = 2'-O-methyl-adenosine
  modified_base 19: mod_base = OTHER; note = 2'-O-methyl-adenosine
  modified_base 20: mod_base = OTHER; note = 2'-O-methyl-adenosine
  modified_base 21: mod_base = gm
  modified_base 22: mod_base = cm
  modified_base 23: mod_base = OTHER; note = 2'-O-methyl-adenosine
  modified_base 24: mod_base = gm
  modified_base 25: mod_base = cm
  modified_base 26: mod_base = cm
  modified_base 27: mod_base = gm
  modified_base 28: mod_base = OTHER; note = 2'-O-methyl-adenosine
  modified_base 29: mod_base = OTHER; note = 2'-O-methyl-adenosine
  modified_base 30: mod_base = OTHER; note = 2'-O-methyl-adenosine
  modified_base 31: mod_base = gm
  modified_base 32: mod_base = gm
  modified_base 33: mod_base = cm
  modified_base 34: mod_base = um
  modified_base 35: mod_base = gm
  modified_base 36: mod_base = cm
  source 1..36: mol_type = other RNA

SEQ ID NO: 764 - RNA, 36 nt, synthetic construct; identical to SEQ ID NO: 582
  misc_feature 1^2: note = linked via phosphorothioate
  modified_base 1: mod_base = OTHER; note = 2'-O-methyl-adenosine
  modified_base 2: mod_base = gm
  modified_base 3: mod_base = gm
  modified_base 4: mod_base = OTHER; note = 2'-O-methyl-adenosine
  modified_base 5: mod_base = um
  modified_base 6: mod_base = cm
  modified_base 7: mod_base = um
  modified_base 8: mod_base = OTHER; note = 2'-Fluoro-adenosine
  modified_base 9: mod_base = OTHER; note = 2'-Fluoro-cytidine
  modified_base 10: mod_base = OTHER; note = 2'-Fluoro-uridine
  modified_base 11: mod_base = OTHER; note = 2'-Fluoro-cytidine
  modified_base 12: mod_base = OTHER; note = 2'-O-methyl-adenosine
  modified_base 13: mod_base = OTHER; note = 2'-O-methyl-adenosine
  modified_base 14: mod_base = cm
  modified_base 15: mod_base = gm
  modified_base 16: mod_base = um
  modified_base 17: mod_base = um
  modified_base 18: mod_base = OTHER; note = hexadecanamidodiethoxymethanol-adenosine
  modified_base 19: mod_base = OTHER; note = 2'-O-methyl-adenosine
  modified_base 20: mod_base = OTHER; note = 2'-O-methyl-adenosine
  modified_base 21: mod_base = gm
  modified_base 22: mod_base = cm
  modified_base 23: mod_base = OTHER; note = 2'-O-methyl-adenosine
  modified_base 24: mod_base = gm
  modified_base 25: mod_base = cm
  modified_base 26: mod_base = cm
  modified_base 27: mod_base = gm
  modified_base 28: mod_base = OTHER; note = 2'-O-methyl-adenosine
  modified_base 29: mod_base = OTHER; note = 2'-O-methyl-adenosine
  modified_base 30: mod_base = OTHER; note = 2'-O-methyl-adenosine
  modified_base 31: mod_base = gm
  modified_base 32: mod_base = gm
  modified_base 33: mod_base = cm
  modified_base 34: mod_base = um
  modified_base 35: mod_base = gm
  modified_base 36: mod_base = cm
  source 1..36: mol_type = other RNA

SEQ ID NO: 765 - RNA, 36 nt, synthetic construct; identical to SEQ ID NO: 582
  misc_feature 1^2: note = linked via phosphorothioate
  modified_base 1: mod_base = OTHER; note = 2'-O-methyl-adenosine
  modified_base 2: mod_base = gm
  modified_base 3: mod_base = gm
  modified_base 4: mod_base = OTHER; note = 2'-O-methyl-adenosine
  modified_base 5: mod_base = um
  modified_base 6: mod_base = cm
  modified_base 7: mod_base = um
  modified_base 8: mod_base = OTHER; note = 2'-Fluoro-adenosine
  modified_base 9: mod_base = OTHER; note = 2'-Fluoro-cytidine
  modified_base 10: mod_base = OTHER; note = 2'-Fluoro-uridine
  modified_base 11: mod_base = OTHER; note = 2'-Fluoro-cytidine
  modified_base 12: mod_base = OTHER; note = 2'-O-methyl-adenosine
  modified_base 13: mod_base = OTHER; note = 2'-O-methyl-adenosine
  modified_base 14: mod_base = cm
  modified_base 15: mod_base = gm
  modified_base 16: mod_base = um
  modified_base 17: mod_base = um
  modified_base 18: mod_base = OTHER; note = 2'-O-methyl-adenosine
  modified_base 19: mod_base = OTHER; note = hexadecanamidodiethoxymethanol-adenosine
  modified_base 20: mod_base = OTHER; note = 2'-O-methyl-adenosine
  modified_base 21: mod_base = gm
  modified_base 22: mod_base = cm
  modified_base 23: mod_base = OTHER; note = 2'-O-methyl-adenosine
  modified_base 24: mod_base = gm
  modified_base 25: mod_base = cm
  modified_base 26: mod_base = cm
  modified_base 27: mod_base = gm
  modified_base 28: mod_base = OTHER; note = 2'-O-methyl-adenosine
  modified_base 29: mod_base = OTHER; note = 2'-O-methyl-adenosine
  modified_base 30: mod_base = OTHER; note = 2'-O-methyl-adenosine
  modified_base 31: mod_base = gm
  modified_base 32: mod_base = gm
  modified_base 33: mod_base = cm
  modified_base 34: mod_base = um
  modified_base 35: mod_base = gm
  modified_base 36: mod_base = cm
  source 1..36: mol_type = other RNA

SEQ ID NO: 766 - RNA, 36 nt, synthetic construct; identical to SEQ ID NO: 582
  misc_feature 1^2: note = linked via phosphorothioate
  modified_base 1: mod_base = OTHER; note = 2'-O-methyl-adenosine
  modified_base 2: mod_base = gm
  modified_base 3: mod_base = gm
  modified_base 4: mod_base = OTHER; note = 2'-O-methyl-adenosine
  modified_base 5: mod_base = um
  modified_base 6: mod_base = cm
  modified_base 7: mod_base = um
  modified_base 8: mod_base = OTHER; note = 2'-Fluoro-adenosine
  modified_base 9: mod_base = OTHER; note = 2'-Fluoro-cytidine
  modified_base 10: mod_base = OTHER; note = 2'-Fluoro-uridine
  modified_base 11: mod_base = OTHER; note = 2'-Fluoro-cytidine
  modified_base 12: mod_base = OTHER; note = 2'-O-methyl-adenosine
  modified_base 13: mod_base = OTHER; note = 2'-O-methyl-adenosine
  modified_base 14: mod_base = cm
  modified_base 15: mod_base = gm
  modified_base 16: mod_base = um
  modified_base 17: mod_base = um
  modified_base 18: mod_base = OTHER; note = 2'-O-methyl-adenosine
  modified_base 19: mod_base = OTHER; note = 2'-O-methyl-adenosine
  modified_base 20: mod_base = OTHER; note = hexadecanamidodiethoxymethanol-adenosine
  modified_base 21: mod_base = gm
  modified_base 22: mod_base = cm
  modified_base 23: mod_base = OTHER; note = 2'-O-methyl-adenosine
  modified_base 24: mod_base = gm
  modified_base 25: mod_base = cm
  modified_base 26: mod_base = cm
  modified_base 27: mod_base = gm
  modified_base 28: mod_base = OTHER; note = 2'-O-methyl-adenosine
  modified_base 29: mod_base = OTHER; note = 2'-O-methyl-adenosine
  modified_base 30: mod_base = OTHER; note = 2'-O-methyl-adenosine
  modified_base 31: mod_base = gm
  modified_base 32: mod_base = gm
  modified_base 33: mod_base = cm
  modified_base 34: mod_base = um
  modified_base 35: mod_base = gm
  modified_base 36: mod_base = cm
  source 1..36: mol_type = other RNA

SEQ ID NO: 767 - RNA, 36 nt, synthetic construct; identical to SEQ ID NO: 582
  misc_feature 1^2: note = linked via phosphorothioate
  modified_base 1: mod_base = OTHER; note = 2'-O-methyl-adenosine
  modified_base 2: mod_base = gm
  modified_base 3: mod_base = gm
  modified_base 4: mod_base = OTHER; note = 2'-O-methyl-adenosine
  modified_base 5: mod_base = um
  modified_base 6: mod_base = cm
  modified_base 7: mod_base = um
  modified_base 8: mod_base = OTHER; note = 2'-Fluoro-adenosine
  modified_base 9: mod_base = OTHER; note = 2'-Fluoro-cytidine
  modified_base 10: mod_base = OTHER; note = 2'-Fluoro-uridine
  modified_base 11: mod_base = OTHER; note = 2'-Fluoro-cytidine
  modified_base 12: mod_base = OTHER; note = 2'-O-methyl-adenosine
  modified_base 13: mod_base = OTHER; note = 2'-O-methyl-adenosine
  modified_base 14: mod_base = cm
  modified_base 15: mod_base = gm
  modified_base 16: mod_base = um
  modified_base 17: mod_base = um
  modified_base 18: mod_base = OTHER; note = 2'-O-methyl-adenosine
  modified_base 19: mod_base = OTHER; note = 2'-O-methyl-adenosine
  modified_base 20: mod_base = OTHER; note = 2'-O-methyl-adenosine
  modified_base 21: mod_base = gm
  modified_base 22: mod_base = cm
  modified_base 23: mod_base = OTHER; note = hexadecanamidodiethoxymethanol-adenosine
  modified_base 24: mod_base = gm
  modified_base 25: mod_base = cm
  modified_base 26: mod_base = cm
  modified_base 27: mod_base = gm
  modified_base 28: mod_base = OTHER; note = 2'-O-methyl-adenosine
  modified_base 29: mod_base = OTHER; note = 2'-O-methyl-adenosine
  modified_base 30: mod_base = OTHER; note = 2'-O-methyl-adenosine
  modified_base 31: mod_base = gm
  modified_base 32: mod_base = gm
  modified_base 33: mod_base = cm
  modified_base 34: mod_base = um
  modified_base 35: mod_base = gm
  modified_base 36: mod_base = cm
  source 1..36: mol_type = other RNA

SEQ ID NO: 768 - RNA, 36 nt, synthetic construct; identical to SEQ ID NO: 582
  misc_feature 1^2: note = linked via phosphorothioate
  modified_base 1: mod_base = OTHER; note = 2'-O-methyl-adenosine
  modified_base 2: mod_base = gm
  modified_base 3: mod_base = gm
  modified_base 4: mod_base = OTHER; note = 2'-O-methyl-adenosine
  modified_base 5: mod_base = um
  modified_base 6: mod_base = cm
  modified_base 7: mod_base = um
  modified_base 8: mod_base = OTHER; note = 2'-Fluoro-adenosine
  modified_base 9: mod_base = OTHER; note = 2'-Fluoro-cytidine
  modified_base 10: mod_base = OTHER; note = 2'-Fluoro-uridine
  modified_base 11: mod_base = OTHER; note = 2'-Fluoro-cytidine
  modified_base 12: mod_base = OTHER; note = 2'-O-methyl-adenosine
  modified_base 13: mod_base = OTHER; note = 2'-O-methyl-adenosine
  modified_base 14: mod_base = cm
  modified_base 15: mod_base = gm
  modified_base 16: mod_base = um
  modified_base 17: mod_base = um
  modified_base 18: mod_base = OTHER; note = 2'-O-methyl-adenosine
  modified_base 19: mod_base = OTHER; note = 2'-O-methyl-adenosine
  modified_base 20: mod_base = OTHER; note = 2'-O-methyl-adenosine
  modified_base 21: mod_base = gm
  modified_base 22: mod_base = cm
  modified_base 23: mod_base = OTHER; note = 2'-O-methyl-adenosine
  modified_base 24: mod_base = gm
  modified_base 25: mod_base = cm
  modified_base 26: mod_base = cm
  modified_base 27: mod_base = gm
  modified_base 28: mod_base = OTHER; note = hexadecanamidodiethoxymethanol-adenosine
  modified_base 29: mod_base = OTHER; note = 2'-O-methyl-adenosine
  modified_base 30: mod_base = OTHER; note = 2'-O-methyl-adenosine
  modified_base 31: mod_base = gm
  modified_base 32: mod_base = gm
  modified_base 33: mod_base = cm
  modified_base 34: mod_base = um
  modified_base 35: mod_base = gm
  modified_base 36: mod_base = cm
  source 1..36: mol_type = other RNA

SEQ ID NO: 769 - RNA, 36 nt, synthetic construct; identical to SEQ ID NO: 582
  misc_feature 1^2: note = linked via phosphorothioate
  modified_base 1: mod_base = OTHER; note = 2'-O-methyl-adenosine
  modified_base 2: mod_base = gm
  modified_base 3: mod_base = gm
  modified_base 4: mod_base = OTHER; note = 2'-O-methyl-adenosine
  modified_base 5: mod_base = um
  modified_base 6: mod_base = cm
  modified_base 7: mod_base = um
  modified_base 8: mod_base = OTHER; note = 2'-Fluoro-adenosine
  modified_base 9: mod_base = OTHER; note = 2'-Fluoro-cytidine
  modified_base 10: mod_base = OTHER; note = 2'-Fluoro-uridine
  modified_base 11: mod_base = OTHER; note = 2'-Fluoro-cytidine
  modified_base 12: mod_base = OTHER; note = 2'-O-methyl-adenosine
  modified_base 13: mod_base = OTHER; note = 2'-O-methyl-adenosine
  modified_base 14: mod_base = cm
  modified_base 15: mod_base = gm
  modified_base 16: mod_base = um
  modified_base 17: mod_base = um
  modified_base 18: mod_base = OTHER; note = 2'-O-methyl-adenosine
  modified_base 19: mod_base = OTHER; note = 2'-O-methyl-adenosine
  modified_base 20: mod_base = OTHER; note = 2'-O-methyl-adenosine
  modified_base 21: mod_base = gm
  modified_base 22: mod_base = cm
  modified_base 23: mod_base = OTHER; note = 2'-O-methyl-adenosine
  modified_base 24: mod_base = gm
  modified_base 25: mod_base = cm
  modified_base 26: mod_base = cm
  modified_base 27: mod_base = gm
  modified_base 28: mod_base = OTHER; note = 2'-O-methyl-adenosine
  modified_base 29: mod_base = OTHER; note = hexadecanamidodiethoxymethanol-adenosine
  modified_base 30: mod_base = OTHER; note = 2'-O-methyl-adenosine
  modified_base 31: mod_base = gm
  modified_base 32: mod_base = gm
  modified_base 33: mod_base = cm
  modified_base 34: mod_base = um
  modified_base 35: mod_base = gm
  modified_base 36: mod_base = cm
  source 1..36: mol_type = other RNA

SEQ ID NO: 770 - RNA, 36 nt, synthetic construct; identical to SEQ ID NO: 582
  misc_feature 1^2: note = linked via phosphorothioate
  modified_base 1: mod_base = OTHER; note = 2'-O-methyl-adenosine
  modified_base 2: mod_base = gm
  modified_base 3: mod_base = gm
  modified_base 4: mod_base = OTHER; note = 2'-O-methyl-adenosine
  modified_base 5: mod_base = um
  modified_base 6: mod_base = cm
  modified_base 7: mod_base = um
  modified_base 8: mod_base = OTHER; note = 2'-Fluoro-adenosine
  modified_base 9: mod_base = OTHER; note = 2'-Fluoro-cytidine
  modified_base 10: mod_base = OTHER; note = 2'-Fluoro-uridine
  modified_base 11: mod_base = OTHER; note = 2'-Fluoro-cytidine
  modified_base 12: mod_base = OTHER; note = 2'-O-methyl-adenosine
  modified_base 13: mod_base = OTHER; note = 2'-O-methyl-adenosine
  modified_base 14: mod_base = cm
  modified_base 15: mod_base = gm
  modified_base 16: mod_base = um
  modified_base 17: mod_base = um
  modified_base 18: mod_base = OTHER; note = 2'-O-methyl-adenosine
  modified_base 19: mod_base = OTHER; note = 2'-O-methyl-adenosine
  modified_base 20: mod_base = OTHER; note = 2'-O-methyl-adenosine
  modified_base 21: mod_base = gm
  modified_base 22: mod_base = cm
  modified_base 23: mod_base = OTHER; note = 2'-O-methyl-adenosine
  modified_base 24: mod_base = gm
  modified_base 25: mod_base = cm
  modified_base 26: mod_base = cm
  modified_base 27: mod_base = gm
  modified_base 28: mod_base = OTHER; note = 2'-O-methyl-adenosine
  modified_base 29: mod_base = OTHER; note = 2'-O-methyl-adenosine
  modified_base 30: mod_base = OTHER; note = hexadecanamidodiethoxymethanol-adenosine
  modified_base 31: mod_base = gm
  modified_base 32: mod_base = gm
  modified_base 33: mod_base = cm
  modified_base 34: mod_base = um
  modified_base 35: mod_base = gm
  modified_base 36: mod_base = cm
  source 1..36: mol_type = other RNA

SEQ ID NO: 771 - RNA, 22 nt, synthetic construct
  misc_feature 1..4: note = linked via phosphorothioate
  modified_base 1: mod_base = OTHER; note = 4'-O-monomethylphosphonate-2'-O-methylmethyluridine
  modified_base 2: mod_base = OTHER; note = 2'-Fluoro-uridine
  modified_base 3: mod_base = OTHER; note = 2'-Fluoro-uridine
  modified_base 4: mod_base = OTHER; note = 2'-Fluoro-adenosine
  modified_base 5: mod_base = OTHER; note = 2'-Fluoro-adenosine
  modified_base 6: mod_base = cm
  modified_base 7: mod_base = OTHER; note = 2'-Fluoro-guanosine
  modified_base 8: mod_base = um
  modified_base 9: mod_base = um
  modified_base 10: mod_base = OTHER; note = 2'-Fluoro-guanosine
  modified_base 11: mod_base = OTHER; note = 2'-O-methyl-adenosine
  modified_base 12: mod_base = gm
  modified_base 13: mod_base = um
  modified_base 14: mod_base = OTHER; note = 2'-Fluoro-adenosine
  modified_base 15: mod_base = gm
  modified_base 16: mod_base = OTHER; note = 2'-O-methyl-adenosine
  modified_base 17: mod_base = um
  modified_base 18: mod_base = cm
  modified_base 19: mod_base = cm
  misc_feature 20..22: note = linked via phosphorothioate
  modified_base 20: mod_base = um
  modified_base 21: mod_base = gm
  modified_base 22: mod_base = gm
  source 1..22: mol_type = other RNA
tttaacgttgagtagatcctgg

SEQ ID NO: 772 - RNA, 20 nt, synthetic construct
  source 1..20: mol_type = other RNA
aggatctactcaacgttaaa

SEQ ID NO: 773 - RNA, 20 nt, synthetic construct
  misc_feature 1^2: note = linked via phosphorothioate
  modified_base 1: mod_base = OTHER; note = hexadecanamidodiethoxymethanol-adenosine
  modified_base 2: mod_base = gm
  modified_base 3: mod_base = gm
  modified_base 4: mod_base = OTHER; note = 2'-O-methyl-adenosine
  modified_base 5: mod_base = um
  modified_base 6: mod_base = cm
  modified_base 7: mod_base = um
  modified_base 8: mod_base = OTHER; note = 2'-Fluoro-adenosine
  modified_base 9: mod_base = OTHER; note = 2'-Fluoro-cytidine
  modified_base 10: mod_base = OTHER; note = 2'-Fluoro-uridine
  modified_base 11: mod_base = OTHER; note = 2'-Fluoro-cytidine
  modified_base 12: mod_base = OTHER; note = 2'-O-methyl-adenosine
  modified_base 13: mod_base = OTHER; note = 2'-O-methyl-adenosine
  modified_base 14: mod_base = cm
  modified_base 15: mod_base = gm
  modified_base 16: mod_base = um
  modified_base 17: mod_base = um
  misc_feature 18..20: note = linked via phosphorothioate
  modified_base 18: mod_base = OTHER; note = 2'-O-methyl-adenosine
  modified_base 19: mod_base = OTHER; note = 2'-O-methyl-adenosine
  modified_base 20: mod_base = OTHER; note = 2'-O-methyl-adenosine
  source 1..20: mol_type = other RNA
aggatctactcaacgttaaa

SEQ ID NO: 774 - RNA, 20 nt, synthetic construct
  misc_feature 1^2: note = linked via phosphorothioate
  modified_base 1: mod_base = OTHER; note = 2'-O-methyl-adenosine
  modified_base 2: mod_base = gm
  modified_base 3: mod_base = gm
  modified_base 4: mod_base = OTHER; note = hexadecanamidodiethoxymethanol-adenosine
  modified_base 5: mod_base = um
  modified_base 6: mod_base = cm
  modified_base 7: mod_base = um
  modified_base 8: mod_base = OTHER; note = 2'-Fluoro-adenosine
  modified_base 9: mod_base = OTHER; note = 2'-Fluoro-cytidine
  modified_base 10: mod_base = OTHER; note = 2'-Fluoro-uridine
  modified_base 11: mod_base = OTHER; note = 2'-Fluoro-cytidine
  modified_base 12: mod_base = OTHER; note = 2'-O-methyl-adenosine
  modified_base 13: mod_base = OTHER; note = 2'-O-methyl-adenosine
  modified_base 14: mod_base = cm
  modified_base 15: mod_base = gm
  modified_base 16: mod_base = um
  modified_base 17: mod_base = um
  misc_feature 18..20: note = linked via phosphorothioate
  modified_base 18: mod_base = OTHER; note = 2'-O-methyl-adenosine
  modified_base 19: mod_base = OTHER; note = 2'-O-methyl-adenosine
  modified_base 20: mod_base = OTHER; note = 2'-O-methyl-adenosine
  source 1..20: mol_type = other RNA
aggatctactcaacgttaaa

SEQ ID NO: 775 - RNA, 20 nt, synthetic construct
  misc_feature 1^2: note = linked via phosphorothioate
  modified_base 1: mod_base = OTHER; note = 2'-O-methyl-adenosine
  modified_base 2: mod_base = gm
  modified_base 3: mod_base = gm
  modified_base 4: mod_base = OTHER; note = 2'-O-methyl-adenosine
  modified_base 5: mod_base = um
  modified_base 6: mod_base = cm
  modified_base 7: mod_base = um
  modified_base 8: mod_base = OTHER; note = hexadecanamidodiethoxymethanol-adenosine
  modified_base 9: mod_base = OTHER; note = 2'-Fluoro-cytidine
  modified_base 10: mod_base = OTHER; note = 2'-Fluoro-uridine
  modified_base 11: mod_base = OTHER; note = 2'-Fluoro-cytidine
  modified_base 12: mod_base = OTHER; note = 2'-O-methyl-adenosine
  modified_base 13: mod_base = OTHER; note = 2'-O-methyl-adenosine
  modified_base 14: mod_base = cm
  modified_base 15: mod_base = gm
  modified_base 16: mod_base = um
  modified_base 17: mod_base = um
  misc_feature 18..20: note = linked via phosphorothioate
  modified_base 18: mod_base = OTHER; note = 2'-O-methyl-adenosine
  modified_base 19: mod_base = OTHER; note = 2'-O-methyl-adenosine
  modified_base 20: mod_base = OTHER; note = 2'-O-methyl-adenosine
  source 1..20: mol_type = other RNA
aggatctactcaacgttaaa

SEQ ID NO: 776 - RNA, 20 nt, synthetic construct
  misc_feature 1^2: note = linked via phosphorothioate
  modified_base 1: mod_base = OTHER; note = 2'-O-methyl-adenosine
  modified_base 2: mod_base = gm
  modified_base 3: mod_base = gm
  modified_base 4: mod_base = OTHER; note = 2'-O-methyl-adenosine
  modified_base 5: mod_base = um
  modified_base 6: mod_base = cm
  modified_base 7: mod_base = um
  modified_base 8: mod_base = OTHER; note = 2'-Fluoro-adenosine
  modified_base 9: mod_base = OTHER; note = 2'-Fluoro-cytidine
  modified_base 10: mod_base = OTHER; note = 2'-Fluoro-uridine
  modified_base 11: mod_base = OTHER; note = 2'-Fluoro-cytidine
  modified_base 12: mod_base = OTHER; note = hexadecanamidodiethoxymethanol-adenosine
  modified_base 13: mod_base = OTHER; note = 2'-O-methyl-adenosine
  modified_base 14: mod_base = cm
  modified_base 15: mod_base = gm
  modified_base 16: mod_base = um
  modified_base 17: mod_base = um
  misc_feature 18..20: note = linked via phosphorothioate
  modified_base 18: mod_base = OTHER; note = 2'-O-methyl-adenosine
  modified_base 19: mod_base = OTHER; note = 2'-O-methyl-adenosine
  modified_base 20: mod_base = OTHER; note = 2'-O-methyl-adenosine
  source 1..20: mol_type = other RNA
aggatctactcaacgttaaa

SEQ ID NO: 777 - RNA, 20 nt, synthetic construct
  misc_feature 1^2: note = linked via phosphorothioate
  modified_base 1: mod_base = OTHER; note = 2'-O-methyl-adenosine
  modified_base 2: mod_base = gm
  modified_base 3: mod_base = gm
  modified_base 4: mod_base = OTHER; note = 2'-O-methyl-adenosine
  modified_base 5: mod_base = um
  modified_base 6: mod_base = cm
  modified_base 7: mod_base = um
  modified_base 8: mod_base = OTHER; note = 2'-Fluoro-adenosine
  modified_base 9: mod_base = OTHER; note = 2'-Fluoro-cytidine
  modified_base 10: mod_base = OTHER; note = 2'-Fluoro-uridine
  modified_base 11: mod_base = OTHER; note = 2'-Fluoro-cytidine
  modified_base 12: mod_base = OTHER; note = 2'-O-methyl-adenosine
  modified_base 13: mod_base = OTHER; note = hexadecanamidodiethoxymethanol-adenosine
  modified_base 14: mod_base = cm
  modified_base 15: mod_base = gm
  modified_base 16: mod_base = um
  modified_base 17: mod_base = um
  misc_feature 18..20: note = linked via phosphorothioate
  modified_base 18: mod_base = OTHER; note = 2'-O-methyl-adenosine
  modified_base 19: mod_base = OTHER; note = 2'-O-methyl-adenosine
  modified_base 20: mod_base = OTHER; note = 2'-O-methyl-adenosine
  source 1..20: mol_type = other RNA
aggatctactcaacgttaaa

SEQ ID NO: 778 - RNA, 20 nt, synthetic construct
  misc_feature 1^2: note = linked via phosphorothioate
  modified_base 1: mod_base = OTHER; note = 2'-O-methyl-adenosine
  modified_base 2: mod_base = gm
  modified_base 3: mod_base = gm
  modified_base 4: mod_base = OTHER; note = 2'-O-methyl-adenosine
  modified_base 5: mod_base = um
  modified_base 6: mod_base = cm
  modified_base 7: mod_base = um
  modified_base 8: mod_base = OTHER; note = 2'-Fluoro-adenosine
  modified_base 9: mod_base = OTHER; note = 2'-Fluoro-cytidine
  modified_base 10: mod_base = OTHER; note = 2'-Fluoro-uridine
  modified_base 11: mod_base = OTHER; note = 2'-Fluoro-cytidine
  modified_base 12: mod_base = OTHER; note = 2'-O-methyl-adenosine
  modified_base 13: mod_base = OTHER; note = 2'-O-methyl-adenosine
  modified_base 14: mod_base = cm
  modified_base 15: mod_base = gm
  modified_base 16: mod_base = um
  modified_base 17: mod_base = um
  misc_feature 18..20: note = linked via phosphorothioate
  modified_base 18: mod_base = OTHER; note = hexadecanamidodiethoxymethanol-adenosine
  modified_base 19: mod_base = OTHER; note = 2'-O-methyl-adenosine
  modified_base 20: mod_base = OTHER; note = 2'-O-methyl-adenosine
  source 1..20: mol_type = other RNA
aggatctactcaacgttaaa

SEQ ID NO: 779 - RNA, 20 nt, synthetic construct
  misc_feature 1^2: note = linked via phosphorothioate
  modified_base 1: mod_base = OTHER; note = 2'-O-methyl-adenosine
  modified_base 2: mod_base = gm
  modified_base 3: mod_base = gm
  modified_base 4: mod_base = OTHER; note = 2'-O-methyl-adenosine
  modified_base 5: mod_base = um
  modified_base 6: mod_base = cm
  modified_base 7: mod_base = um
  modified_base 8: mod_base = OTHER; note = 2'-Fluoro-adenosine
  modified_base 9: mod_base = OTHER; note = 2'-Fluoro-cytidine
  modified_base 10: mod_base = OTHER; note = 2'-Fluoro-uridine
  modified_base 11: mod_base = OTHER; note = 2'-Fluoro-cytidine
  modified_base 12: mod_base = OTHER; note = 2'-O-methyl-adenosine
  modified_base 13: mod_base = OTHER; note = 2'-O-methyl-adenosine
  modified_base 14: mod_base = cm
  modified_base 15: mod_base = gm
  modified_base 16: mod_base = um
  modified_base 17: mod_base = um
  misc_feature 18..20: note = linked via phosphorothioate
  modified_base 18: mod_base = OTHER; note = 2'-O-methyl-adenosine
  modified_base 19: mod_base = OTHER; note = hexadecanamidodiethoxymethanol-adenosine
  modified_base 20: mod_base = OTHER; note = 2'-O-methyl-adenosine
  source 1..20: mol_type = other RNA
aggatctactcaacgttaaa

SEQ ID NO: 780 - RNA, 20 nt, synthetic construct
  misc_feature 1^2: note = linked via phosphorothioate
  modified_base 1: mod_base = OTHER; note = 2'-O-methyl-adenosine
  modified_base 2: mod_base = gm
  modified_base 3: mod_base = gm
  modified_base 4: mod_base = OTHER; note = 2'-O-methyl-adenosine
  modified_base 5: mod_base = um
  modified_base 6: mod_base = cm
  modified_base 7: mod_base = um
  modified_base 8: mod_base = OTHER; note = 2'-Fluoro-adenosine
  modified_base 9: mod_base = OTHER; note = 2'-Fluoro-cytidine
  modified_base 10: mod_base = OTHER; note = 2'-Fluoro-uridine
  modified_base 11: mod_base = OTHER; note = 2'-Fluoro-cytidine
  modified_base 12: mod_base = OTHER; note = 2'-O-methyl-adenosine
  modified_base 13: mod_base = OTHER; note = 2'-O-methyl-adenosine
  modified_base 14: mod_base = cm
  modified_base 15: mod_base = gm
  modified_base 16: mod_base = um
  modified_base 17: mod_base = um
  misc_feature 18..20: note = linked via phosphorothioate
  modified_base 18: mod_base = OTHER; note = 2'-O-methyl-adenosine
  modified_base 19: mod_base = OTHER; note = 2'-O-methyl-adenosine
  modified_base 20: mod_base = OTHER; note = hexadecanamidodiethoxymethanol-adenosine
  source 1..20: mol_type = other RNA
aggatctactcaacgttaaa

SEQ ID NO: 781 - DNA, 5501 bp, Homo sapiens
  source 1..5501: mol_type = genomic DNA
agagccagagcaggatggagaggagacgcatcacctccgctgctcgccgctcctacgtctcctcaggggagatgatggtggggggcctggctcctggccgccgtctgggtcctggcacccgcctctccctggctcgaatgccccctccactcccgacccgggtggatttctccctggctggggcactcaatgctggcttcaaggagacccgggccagtgagcgggcagagatgatggagctcaatgaccgctttgccagctacatcgagaaggttcgcttcctggaacagcaaaacaaggcgctggctgctgagctgaaccagctgcgggccaaggagcccaccaagctggcagacgtctaccaggctgagctgcgagagctgcggctgcggctcgatcaactcaccgccaacagcgcccggctggaggttgagagggacaatctggcacaggacctggccactgtgaggcagaagctccaggatgaaaccaacctgaggctggaagccgagaacaacctggctgcctatagacaggaagcagatgaagccaccctggcccgtctggatctggagaggaagattgagtcgctggaggaggagatccggttcttgaggaagatccacgaggaggaggttcgggaactccaggagcagctggcccgacagcaggtccatgtggagcttgacgtggccaagccagacctcaccgcagccctgaaagagatccgcacgcagtatgaggcaatggcgtccagcaacatgcatgaagccgaagagtggtaccgctccaagtttgcagacctgacagacgctgctgcccgcaacgcggagctgctccgccaggccaagcacgaagccaacgactaccggcgccagttgcagtccttgacctgcgacctggagtctctgcgcggcacgaacgagtccctggagaggcagatgcgcgagcaggaggagcggcacgtgcgggaggcggccagttatcaggaggcgctggcgcggctggaggaagaggggcagagcctcaaggacgagatggcccgccacttgcaggagtaccaggacctgctcaatgtcaagctggccctggacatcgagatcgccacctacaggaagctgctagagggcgaggagaaccggatcaccattcccgtgcagaccttctccaacctgcagattcgagaaaccagcctggacaccaagtctgtgtcagaaggccacctcaagaggaacatcgtggtgaagaccgtggagatgcgggatggagaggtcattaaggagtccaagcaggagcacaaggatgtgatgtgaggcaggacccacctggtggcctctgccccgtctcatgaggggcccgagcagaagcaggatagttgctccgcctctgctggcacatttccccagacctgagctccccaccaccccagctgctcccctccctcctctgtccctaggtcagcttgctgccctaggctccgtcagtatcaggcctgccagacggcacccacccagcacccagcaactccaactaacaagaaactcacccccaaggggcagtctggaggggcatggccagcagcttgcgttagaatgaggaggaaggagagaaggggaggagggcggggggcacctactacatcgccctccacatccctgattcctgttgttatggaaactgttgccagagatggaggttctctcggagtatctgggaactgtgcctttgagtttcctcaggctgctggaggaaaactgagactcagacaggaaagggaaggccccacagacaaggtagccctggccagaggcttgttttgtcttttggtttttatgaggtgggatatccctatgctgcctaggctgaccttgaactcctgggctcaagcagtctacccacctcagcctcctgtgtagctgggattatagattggagccaccatgcccagctcagagggttgttctcctagactgaccctgatcagtctaagatgggtggggacgtcctgccacctggggcagtcacctgcccagatcccagaaggacctcctgagcgatgactcaagtgtctcagtccacctgagctgccatccagggatgccatctgtgggcacgctgtgggcaggtgggagcttgattctcagcacttgggggatctgttgtgtacgtggagagggatgaggtgctgggagggatagaggggggctgcctggcccccagctgtgggtacagagaggtcaagcccaggaggactgccccgtgcagactggaggggacgctggtagagatggaggaggaggcaattgggatggcgctaggcatacaagtaggggttgtgggtgaccagttgcacttggcctctggattgtgggaattaaggaagtgactcatcctcttgaagatgctgaaacaggagagaaaggggatgtatccatgggggcagggcatgactttgtcccatttctaaaggcctcttccttgctgtgtcataccaggccgccccagcctctgagcccctgggactgctgcttcttaaccccagtaagccactgccacacgtctgaccctctccaccccatagtgaccggctgcttttccctaagccaagggcctcttgcggtcccttcttactcacacacaaaatgtacccagtattctaggtagtgccctattttacaattgtaaaactgaggcacgagcaaagtgaagacactggctcatattcctgcagcctggaggccgggtgctcagggctgacacgtccaccccagtgcacccactctgctttgactgagcagactggtgagcagactggtgggatctgtgcccagagatgggactgggagggcccacttcagggttctcctctcccctctaaggccgaagaagggtccttccctctccccaagacttggtgtcctttccctccactccttcctgccacctgctgctgctgctgctgctaatcttcagggcactgctgctgcctttagtcgctgaggaaaaataaagacaaatgctgcgcccttccccagagtggactctgatctgttcatgagagggcgggactggggccaagatgtagcctttgacaagaccaactcatttcttattactgatcatctctggggcccatgccctcaccaaattccacccgcagccaaagaggacatacaccagctccctccactcttttcttccttcctctccctgctacctgcaactcaaccagcacaatcttcataggcaagaaagcaaagcagctcaaacatgattcaacactgatcagtgtttaccactggataaatctgagttcacactttccttctctgacctaaatgtgaagtcaggaaacacatgtgccctacttccatcctgagctcagtccccaatctcccaccagcctcaggcccctccacttctcagatcaggtcccagacctgcccatgaaaatggggagcaggctgtaacagatttgtccacatgttcctaccacctgtcccaacccagggtacccacccagagacatctggtatcatttaacaaacacattgaaggacaactggtcttcagagctgaagagagctcctagggggagaagctgggacaacagtgaaataagtagcagcagcaacgacagaagtgaatggtgacaaagactgctgtgatgagcaggtagcctatcagggtgagctccacagccgagcgagtctcaggatctgagaacgaggctgggtagtgcccatgagatgtcacacccagccggaagccagcaactagcacaccctgcctccagcaatagtagatgccccggtcatccagctgggtgaagcggatgtggagctggttgccgtggtcaatgaacaccctcatggacctgttgacacccttcaggtactgtgtgcggtagaggtgctggcggtctttgtcccaggccactgcatgctctggccgggccccaggacaggagatgatgagtccatggcccagtctctgctggtggaactgaatgggcacctggggcacccagggccggctgcccactttggacacatagttaatgatggccagcacgccctcccggatggtctttgtcttctcacagggtactaagcagctccgaaccagcacctcaggcgtgtggtccctggccttggtccgcagcttccttggcacagcccttgagccacaagacaccacatcgggcacggccttgaggtagcgtggggagaggtctgggctctgcaggtagcagaggccgatgcgccactgctccccacgcactccgcagcggtcacagggggtccattcccagaaggtggtgaagacatggaggtgcccatagtattcatctgcaaagggctcctggcccttgtcctggaaagtggccaccattccctcactgttctggatgtccacatcgtaggcgtaaaagtagtcccccttgcgggtgccgcagaagtacaggcctgagtcctcagactgagccctgaaaaccaacaagctgaacatgcggatgctgaagcgggtcagcatgtcgctgcccacacgtacctgggctgcctccgtcagcacccgcccatcaaagtccgtcagcactttggtgtggctgctacctaggtgcttttggtagaaccagactacagctggcacctcttcgggtttgcagtgacagggaagctcaaagctcatgtcggccaggtaggctgcattttcaaacatcaggaaagcagggcagggggtcctctgaaaaatgttttccttctccacaatttcaaaggcctggagcccccatgcccacaggagcacagtggtgagggccaggtgcatacctgaaggaggcaggggtcagaggggcagggcaaaaccagggcattaaaggctcatagggctcctagaaagctctgctaagcggaagcctctagatgaggaaaggattatgcagccaggaaaagcagcaacaatctgcagaggaagccgccaagtgcaaggcaatttattcccagtggatgtacaagatgcccttctaacattccagacctgatctcagggtggggggggaaagccattctagaacctggcctttactcccctttctagaacactggcgctcacccaagaatgggtcaaaggaaaccggaatgagaagggcgggccgaggtgctcgggcagggagatctctgcctcagtgctccaggccctgccctgccagcctggtggaaaagtctttcatcaacctgggggatgaaggaaacccaccctcctgcatatctggccatccgggaggctggctggacctgagctgatggcttgggactttcccaggcccaacctgcacaagaactgagtctctaggggaaaattcaacacctcaaatgatgtagtatttgatcatttgttgattacatgtccattcattggtttggggctataaacattcttgttaagagctgtggagatcagtgtttgtttaccataaagattttgctttttccctttta

SEQ ID NO: 782 - DNA, 1774 bp, Homo sapiens
  source 1..1774: mol_type = genomic DNA
agagccagagcaggatggagaggagacgcatcacctccgctgctcgccgctcctacgtctcctcaggggagatgatggtggggggcctggctcctggccgccgtctgggtcctggcacccgcctctccctggctcgaatgccccctccactcccgacccgggtggatttctccctggctggggcactcaatgctggcttcaaggagacccgggccagtgagcgggcagagatgatggagctcaatgaccgctttgccagctacatcgagaaggttcgcttcctggaacagcaaaacaaggcgctggctgctgagctgaaccagctgcgggccaaggagcccaccaagctggcagacgtctaccaggctgagctgcgagagctgcggctgcggctcgatcaactcaccgccaacagcgcccggctggaggttgagagggacaatctggcacaggacctggccactgtgaggcagaagctccaggatgaaaccaacctgaggctggaagccgagaacaacctggctgcctatagacaggaagcagatgaagccaccctggcccgtctggatctggagaggaagattgagtcgctggaggaggagatccggttcttgaggaagatccacgaggaggaggttcgggaactccaggagcagctggcccgacagcaggtccatgtggagcttgacgtggccaagccagacctcaccgcagccctgaaagagatccgcacgcagtatgaggcaatggcgtccagcaacatgcatgaagccgaagagtggtaccgctccaagtttgcagacctgacagacgctgctgcccgcaacgcggagctgctccgccaggccaagcacgaagccaacgactaccggcgccagttgcagtccttgacctgcgacctggagtctctgcgcggcacgaacgagtccctggagaggcagatgcgcgagcaggaggagcggcacgtgcgggaggcggccagttatcaggaggcgctggcgcggctggaggaagaggggcagagcctcaaggacgagatggcccgccacttgcaggagtaccaggacctgctcaatgtcaagctggccctggacatcgagatcgccacctacaggaagctgctagagggcgaggagaaccggatcaccattcccgtgcagaccttctccaacctgcagattcgagggggcaaaagcaccaaagacggggaaaatcacaaggtcacaagatatctcaaaagcctcacaatacgagttataccaatacaggctcaccagattgtaaatggaacgccgccggctcgcggttagctgcctgcctctcagacacggcgctttgcccagcttgacagggagtgagcctcacccaccccatcctcccaatccccctgagttccctcttcccaggcttcccctaaagggcctggactgcgtcattttcccaggaactgcagtgcccagcccaggacgtggtacagagtaactgtacattaaactggcagagcttgttagtggtaaaggtggtgagtccttgggtgcgcagtggagctgctctggggcctctgagcaagcagcagcctctgtctcacctcttcctgtcactgggagggccccttgggtctcgctgtgcctggacgccaggctctctgctttattctttcatccctgaggctccatcgctcagctcagtgctgactcagttcagaggattcttccctcaggaccgcagctcttgcagtgaataaagttttatgttccctgctcttaatgttaaa

SEQ ID NO: 783 - DNA, 2128 bp, Homo sapiens
  source 1..2128: mol_type = genomic DNA
agagccagagcaggatggagaggagacgcatcacctccgctgctcgccgctcctacgtctcctcaggggagatgatggtggggggcctggctcctggccgccgtctgggtcctggcacccgcctctccctggctcgaatgccccctccactcccgacccgggtggatttctccctggctggggcactcaatgctggcttcaaggagacccgggccagtgagcgggcagagatgatggagctcaatgaccgctttgccagctacatcgagaaggttcgcttcctggaacagcaaaacaaggcgctggctgctgagctgaaccagctgcgggccaaggagcccaccaagctggcagacgtctaccaggctgagctgcgagagctgcggctgcggctcgatcaactcaccgccaacagcgcccggctggaggttgagagggacaatctggcacaggacctggccactgtgaggcagaagctccaggatgaaaccaacctgaggctggaagccgagaacaacctggctgcctatagacaggaagcagatgaagccaccctggcccgtctggatctggagaggaagattgagtcgctggaggaggagatccggttcttgaggaagatccacgaggaggaggttcgggaactccaggagcagctggcccgacagcaggtccatgtggagcttgacgtggccaagccagacctcaccgcagccctgaaagagatccgcacgcagtatgaggcaatggcgtccagcaacatgcatgaagccgaagagtggtaccgctccaagtttgcagacctgacagacgctgctgcccgcaacgcggagctgctccgccaggccaagcacgaagccaacgactaccggcgccagttgcagtccttgacctgcgacctggagtctctgcgcggcacgaacgagtccctggagaggcagatgcgcgagcaggaggagcggcacgtgcgggaggcggccagttatcaggaggcgctggcgcggctggaggaagaggggcagagcctcaaggacgagatggcccgccacttgcaggagtaccaggacctgctcaatgtcaagctggccctggacatcgagatcgccacctacaggaagctgctagagggcgaggagaaccggatcaccattcccgtgcagaccttctccaacctgcagattcgaggtcagtacagcagggcctcgtgggaagggcactggagtcctgccccctcctccagggcctgtaggttgctccagactgggactgaggatcagggcaaagggatccagctctccctgggggccttcgtgacactgcagcgctcctagccagagcctatcataccagggtacttctaggtggggcttgcagctgcccctgtcctgctaggccctggtccctcttcccctccctgcaccccattcgacagcagaactgggtgagagcttgacatctgccctgtctgcagatccctgagcaagcactgcccttctgagtgttttctgtttttgtttttttaactgcttgtcactacagggggcaaaagcaccaaagacggggaaaatcacaaggtcacaagatatctcaaaagcctcacaatacgagttataccaatacaggctcaccagattgtaaatggaacgccgccggctcgcggttagctgcctgcctctcagacacggcgctttgcccagcttgacagggagtgagcctcacccaccccatcctcccaatccccctgagttccctcttcccaggcttcccctaaagggcctggactgcgtcattttcccaggaactgcagtgcccagcccaggacgtggtacagagtaactgtacattaaactggcagagcttgttagtggtaaaggtggtgagtccttgggtgcgcagtggagctgctctggggcctctgagcaagcagcagcctctgtctcacctcttcctgtcactgggagggccccttgggtctcgctgtgcctggacgccaggctctctgctttattctttcatccctgaggctccatcgctcagctcagtgctgactcagttcagaggattcttccctcaggaccgcagctcttgcagtgaataaagttttatgttccctgctcttaatgttaaa

SEQ ID NO: 784 - DNA, 3154 bp, Homo sapiens
  source 1..3154: mol_type = genomic DNA
agagccagagcaggatggagaggagacgcatcacctccgctgctcgccgctcctacgtctcctcaggggagatgatggtggggggcctggctcctggccgccgtctgggtcctggcacccgcctctccctggctcgaatgccccctccactcccgacccgggtggatttctccctggctggggcactcaatgctggcttcaaggagacccgggccagtgagcgggcagagatgatggagctcaatgaccgctttgccagctacatcgagaaggttcgcttcctggaacagcaaaacaaggcgctggctgctgagctgaaccagctgcgggccaaggagcccaccaagctggcagacgtctaccaggctgagctgcgagagctgcggctgcggctcgatcaactcaccgccaacagcgcccggctggaggttgagagggacaatctggcacaggacctggccactgtgaggcagaagctccaggatgaaaccaacctgaggctggaagccgagaacaacctggctgcctatagacaggaagcagatgaagccaccctggcccgtctggatctggagaggaagattgagtcgctggaggaggagatccggttcttgaggaagatccacgaggaggaggttcgggaactccaggagcagctggcccgacagcaggtccatgtggagcttgacgtggccaagccagacctcaccgcagccctgaaagagatccgcacgcagtatgaggcaatggcgtccagcaacatgcatgaagccgaagagtggtaccgctccaagtttgcagacctgacagacgctgctgcccgcaacgcggagctgctccgccaggccaagcacgaagccaacgactaccggcgccagttgcagtccttgacctgcgacctggagtctctgcgcggcacgaacgagtccctggagaggcagatgcgcgagcaggaggagcggcacgtgcgggaggcggccagttatcaggaggcgctggcgcggctggaggaagaggggcagagcctcaaggacgagatggcccgccacttgcaggagtaccaggacctgctcaatgtcaagctggccctggacatcgagatcgccacctacaggaagctgctagagggcgaggagaaccggatcaccattcccgtgcagaccttctccaacctgcagattcgagggggcaaaagcaccaaagacggggaaaatcacaaggtcacaagatatctcaaaagcctcacaatacgagttataccaatacaggctcaccagattgtaaatggaacgccgccggctcgcgaaaccagcctggacaccaagtctgtgtcagaaggccacctcaagaggaacatcgtggtgaagaccgtggagatgcgggatggagaggtcattaaggagtccaagcaggagcacaaggatgtgatgtgaggcaggacccacctggtggcctctgccccgtctcatgaggggcccgagcagaagcaggatagttgctccgcctctgctggcacatttccccagacctgagctccccaccaccccagctgctcccctccctcctctgtccctaggtcagcttgctgccctaggctccgtcagtatcaggcctgccagacggcacccacccagcacccagcaactccaactaacaagaaactcacccccaaggggcagtctggaggggcatggccagcagcttgcgttagaatgaggaggaaggagagaaggggaggagggcggggggcacctactacatcgccctccacatccctgattcctgttgttatggaaactgttgccagagatggaggttctctcggagtatctgggaactgtgcctttgagtttcctcaggctgctggaggaaaactgagactcagacaggaaagggaaggccccacagacaaggtagccctggccagaggcttgttttgtcttttggtttttatgaggtgggatatccctatgctgcctaggctgaccttgaactcctgggctcaagcagtctacccacctcagcctcctgtgtagctgggattatagattggagccaccatgcccagctcagagggttgttctcctagactgaccctgatcagtctaagatgggtggggacgtcctgccacctggggcagtcacctgcccagatcccagaaggacctcctgagcgatgactcaagtgtctcagtccacctgagctgccatccagggatgccatctgtgggcacgctgtgggcaggtgggagcttgattctcagcacttgggggatctgttgtgtacgtggagagggatgaggtgctgggagggatagaggggggctgcctggcccccagctgtgggtacagagaggtcaagcccaggaggactgccccgtgcagactggaggggacgctggtagagatggaggaggaggcaattgggatggcgctaggcatacaagtaggggttgtgggtgaccagttgcacttggcctctggattgtgggaattaaggaagtgactcatcctcttgaagatgctgaaacaggagagaaaggggatgtatccatgggggcagggcatgactttgtcccatttctaaaggcctcttccttgctgtgtcataccaggccgccccagcctctgagcccctgggactgctgcttcttaaccccagtaagccactgccacacgtctgaccctctccaccccatagtgaccggctgcttttccctaagccaagggcctcttgcggtcccttcttactcacacacaaaatgtacccagtattctaggtagtgccctattttacaattgtaaaactgaggcacgagcaaagtgaagacactggctcatattcctgcagcctggaggccgggtgctcagggctgacacgtccaccccagtgcacccactctgctttgactgagcagactggtgagcagactggtgggatctgtgcccagagatgggactgggagggcccacttcagggttctcctctcccctctaaggccgaagaagggtccttccctctccccaagacttggtgtcctttccctccactccttcctgccacctgctgctgctgctgctgctaatcttcagggcactgctgctgcctttagtcgctgaggaaaaataaagacaaatgctgcgcccttcccca

SEQ ID NO: 785 - RNA, 16 nt, synthetic construct
  source 1..16: mol_type = other RNA
gcagccgaaaggctgc

SEQ ID NO: 786 - RNA, 19 nt, synthetic construct
  source 1..19: mol_type = other RNA
caattatgtttgaaagcca

SEQ ID NO: 787 - RNA, 19 nt, synthetic construct
  source 1..19: mol_type = other RNA
aattatgtttgaaagccat

SEQ ID NO: 788 - RNA, 19 nt, synthetic construct
  source 1..19: mol_type = other RNA
ttgacatactggatcacta

SEQ ID NO: 789 - RNA, 19 nt, synthetic construct
  source 1..19: mol_type = other RNA
acatactggatcactatac

SEQ ID NO: 790 - RNA, 19 nt, synthetic construct
  source 1..19: mol_type = other RNA
catactggatcactatact

SEQ ID NO: 791 - RNA, 19 nt, synthetic construct
  source 1..19: mol_type = other RNA
ctggatcactatactaaga

SEQ ID NO: 792 - RNA, 19 nt, synthetic construct
  source 1..19: mol_type = other RNA
atatgtgtggatttgtgat

SEQ ID NO: 793 - RNA, 19 nt, synthetic construct
  source 1..19: mol_type = other RNA
aggataatgcagaagtaca

SEQ ID NO: 794 - RNA, 19 nt, synthetic construct
  source 1..19: mol_type = other RNA
agcatagcacagttaatgg

SEQ ID NO: 795 - RNA, 19 nt, synthetic construct
  source 1..19: mol_type = other RNA
tggctttcaaacataattg

SEQ ID NO: 796 - RNA, 19 nt, synthetic construct
  source 1..19: mol_type = other RNA
atggctttcaaacataatt

SEQ ID NO: 797 - RNA, 19 nt, synthetic construct
  source 1..19: mol_type = other RNA
tagtgatccagtatgtcaa

SEQ ID NO: 798 - RNA, 19 nt, synthetic construct
  source 1..19: mol_type = other RNA
gtatagtgatccagtatgt

SEQ ID NO: 799 - RNA, 19 nt, synthetic construct
  source 1..19: mol_type = other RNA
agtatagtgatccagtatg

SEQ ID NO: 800 - RNA, 19 nt, synthetic construct
  source 1..19: mol_type = other RNA
tcttagtatagtgatccag

SEQ ID NO: 801 - RNA, 19 nt, synthetic construct
  source 1..19: mol_type = other RNA
atcacaaatccacacatat

SEQ ID NO: 802 - RNA, 19 nt, synthetic construct
  source 1..19: mol_type = other RNA
tgtacttctgcattatcct

SEQ ID NO: 803 - RNA, 19 nt, synthetic construct
  source 1..19: mol_type = other RNA
ccattaactgtgctatgct

SEQ ID NO: 804 - RNA, 36 nt, synthetic construct; identical to SEQ ID NO: 580
  source 1..36: mol_type = other RNA

SEQ ID NO: 805 - RNA, 36 nt, synthetic construct
  source 1..36: mol_type = other RNA
aattatgtttgaaagccatagcagccgaaaggctgc

SEQ ID NO: 806 - RNA, 36 nt, synthetic construct
  source 1..36: mol_type = other RNA
ttgacatactggatcactaagcagccgaaaggctgc

SEQ ID NO: 807 - RNA, 36 nt, synthetic construct
  source 1..36: mol_type = other RNA
acatactggatcactatacagcagccgaaaggctgc

SEQ ID NO: 808 - RNA, 36 nt, synthetic construct
  source 1..36: mol_type = other RNA
catactggatcactatactagcagccgaaaggctgc

SEQ ID NO: 809 - RNA, 36 nt, synthetic construct
  source 1..36: mol_type = other RNA
ctggatcactatactaagaagcagccgaaaggctgc

SEQ ID NO: 810 - RNA, 36 nt, synthetic construct
  source 1..36: mol_type = other RNA
atatgtgtggatttgtgatagcagccgaaaggctgc

SEQ ID NO: 811 - RNA, 36 nt, synthetic construct
  source 1..36: mol_type = other RNA
aggataatgcagaagtacaagcagccgaaaggctgc

SEQ ID NO: 812 - RNA, 36 nt, synthetic construct
  source 1..36: mol_type = other RNA
agcatagcacagttaatggagcagccgaaaggctgc

SEQ ID NO: 813 - RNA, 22 nt, synthetic construct
  source 1..22: mol_type = other RNA
ttggctttcaaacataattggg

SEQ ID NO: 814 - RNA, 22 nt, synthetic construct
  source 1..22: mol_type = other RNA
tatggctttcaaacataattgg

SEQ ID NO: 815 - RNA, 22 nt, synthetic construct
  source 1..22: mol_type = other RNA
ttagtgatccagtatgtcaagg

SEQ ID NO: 816 - RNA, 22 nt, synthetic construct
  source 1..22: mol_type = other RNA
tgtatagtgatccagtatgtgg

SEQ ID NO: 817 - RNA, 22 nt, synthetic construct
  source 1..22: mol_type = other RNA
tagtatagtgatccagtatggg

SEQ ID NO: 818 - RNA, 22 nt, synthetic construct
  source 1..22: mol_type = other RNA
ttcttagtatagtgatccaggg

SEQ ID NO: 819 - RNA, 22 nt, synthetic construct
  source 1..22: mol_type = other RNA
tatcacaaatccacacatatgg

SEQ ID NO: 820 - RNA, 22 nt, synthetic construct
  source 1..22: mol_type = other RNA
ttgtacttctgcattatcctgg

SEQ ID NO: 821 - RNA, 22 nt, synthetic construct
  source 1..22: mol_type = other RNA
tccattaactgtgctatgctgg

SEQ ID NO: 822 - RNA, 36 nt, synthetic construct; identical to SEQ ID NO: 580
  misc_feature 1^2: note = linked via phosphorothioate
  modified_base 1: mod_base = cm
  modified_base 2: mod_base = OTHER; note = 2'-O-methyl-adenosine
  modified_base 3: mod_base = OTHER; note = 2'-O-methyl-adenosine
  modified_base 4: mod_base = um
  modified_base 5: mod_base = um
  modified_base 6: mod_base = OTHER; note = 2'-O-methyl-adenosine
  modified_base 7: mod_base = um
  modified_base 8: mod_base = OTHER; note = 2'-Fluoro-guanosine
  modified_base 9: mod_base = OTHER; note = 2'-Fluoro-uridine
  modified_base 10: mod_base = OTHER; note = 2'-Fluoro-uridine
  modified_base 11: mod_base = OTHER; note = 2'-Fluoro-uridine
  modified_base 12: mod_base = gm
  modified_base 13: mod_base = OTHER; note = 2'-O-methyl-adenosine
  modified_base 14: mod_base = OTHER; note = 2'-O-methyl-adenosine
  modified_base 15: mod_base = OTHER; note = 2'-O-methyl-adenosine
  modified_base 16: mod_base = gm
  modified_base 17: mod_base = cm
  modified_base 18: mod_base = cm
  modified_base 19: mod_base = OTHER; note = 2'-O-methyl-adenosine
  modified_base 20: mod_base = OTHER; note = 2'-O-methyl-adenosine
  modified_base 21: mod_base = gm
  modified_base 22: mod_base = cm
  modified_base 23: mod_base = OTHER; note = 2'-O-methyl-adenosine
  modified_base 24: mod_base = gm
  modified_base 25: mod_base = cm
  modified_base 26: mod_base = cm
  modified_base 27: mod_base = gm
  modified_base 28: mod_base = OTHER; note = aminodiethoxymethanol-adenosine-N-acetylgalactosamine
  modified_base 29: mod_base = OTHER; note = aminodiethoxymethanol-adenosine-N-acetylgalactosamine
  modified_base 30: mod_base = OTHER; note = aminodiethoxymethanol-adenosine-N-acetylgalactosamine
  modified_base 31: mod_base = gm
  modified_base 32: mod_base = gm
  modified_base 33: mod_base = cm
  modified_base 34: mod_base = um
  modified_base 35: mod_base = gm
  modified_base 36: mod_base = cm
  source 1..36: mol_type = other RNA

SEQ ID NO: 823 - RNA, 36 nt, synthetic construct; identical to SEQ ID NO: 805
  misc_feature 1^2: note = linked via phosphorothioate
  modified_base 1: mod_base = OTHER; note = 2'-O-methyl-adenosine
  modified_base 2: mod_base = OTHER; note = 2'-O-methyl-adenosine
  modified_base 3: mod_base = um
  modified_base 4: mod_base = um
  modified_base 5: mod_base = OTHER; note = 2'-O-methyl-adenosine
  modified_base 6: mod_base = um
  modified_base 7: mod_base = gm
  modified_base 8: mod_base = OTHER; note = 2'-Fluoro-uridine
  modified_base 9: mod_base = OTHER; note = 2'-Fluoro-uridine
  modified_base 10: mod_base = OTHER; note = 2'-Fluoro-uridine
  modified_base 11: mod_base = OTHER; note = 2'-Fluoro-guanosine
  modified_base 12: mod_base = OTHER; note = 2'-O-methyl-adenosine
  modified_base 13: mod_base = OTHER; note = 2'-O-methyl-adenosine
  modified_base 14: mod_base = OTHER; note = 2'-O-methyl-adenosine
  modified_base 15: mod_base = gm
  modified_base 16: mod_base = cm
  modified_base 17: mod_base = cm
  modified_base 18: mod_base = OTHER; note = 2'-O-methyl-adenosine
  modified_base 19: mod_base = um
  modified_base 20: mod_base = OTHER; note = 2'-O-methyl-adenosine
  modified_base 21: mod_base = gm
  modified_base 22: mod_base = cm
  modified_base 23: mod_base = OTHER; note = 2'-O-methyl-adenosine
  modified_base 24: mod_base = gm
  modified_base 25: mod_base = cm
  modified_base 26: mod_base = cm
  modified_base 27: mod_base = gm
  modified_base 28: mod_base = OTHER; note = aminodiethoxymethanol-adenosine-N-acetylgalactosamine
  modified_base 29: mod_base = OTHER; note = aminodiethoxymethanol-adenosine-N-acetylgalactosamine
  modified_base 30: mod_base = OTHER; note = aminodiethoxymethanol-adenosine-N-acetylgalactosamine
  modified_base 31: mod_base = gm
  modified_base 32: mod_base = gm
  modified_base 33: mod_base = cm
  modified_base 34: mod_base = um
  modified_base 35: mod_base = gm
  modified_base 36: mod_base = cm
  source 1..36: mol_type = other RNA

SEQ ID NO: 824 - RNA, 36 nt, synthetic construct; identical to SEQ ID NO: 806
  misc_feature 1^2: note = linked via phosphorothioate
  modified_base 1: mod_base = um
  modified_base 2: mod_base = um
  modified_base 3: mod_base = gm
  modified_base 4: mod_base = OTHER; note = 2'-O-methyl-adenosine
  modified_base 5: mod_base = cm
  modified_base 6: mod_base = OTHER; note = 2'-O-methyl-adenosine
  modified_base 7: mod_base = um
  modified_base 8: mod_base = OTHER; note = 2'-Fluoro-adenosine
  modified_base 9: mod_base = OTHER; note = 2'-Fluoro-cytidine
  modified_base 10: mod_base = OTHER; note = 2'-Fluoro-uridine
  modified_base 11: mod_base = OTHER; note = 2'-Fluoro-guanosine
  modified_base 12: mod_base = gm
  modified_base 13: mod_base = OTHER; note = 2'-O-methyl-adenosine
  modified_base 14: mod_base = um
  modified_base 15: mod_base = cm
  modified_base 16: mod_base = OTHER; note = 2'-O-methyl-adenosine
  modified_base 17: mod_base = cm
  modified_base 18: mod_base = um
  modified_base 19: mod_base = OTHER; note = 2'-O-methyl-adenosine
  modified_base 20: mod_base = OTHER; note = 2'-O-methyl-adenosine
  modified_base 21: mod_base = gm
  modified_base 22: mod_base = cm
  modified_base 23: mod_base = OTHER; note = 2'-O-methyl-adenosine
  modified_base 24: mod_base = gm
  modified_base 25: mod_base = cm
  modified_base 26: mod_base = cm
  modified_base 27: mod_base = gm
  modified_base 28: mod_base = OTHER; note = aminodiethoxymethanol-adenosine-N-acetylgalactosamine
  modified_base 29: mod_base = OTHER; note = aminodiethoxymethanol-adenosine-N-acetylgalactosamine
  modified_base 30: mod_base = OTHER; note = aminodiethoxymethanol-adenosine-N-acetylgalactosamine
  modified_base 31: mod_base = gm
  modified_base 32: mod_base = gm
  modified_base 33: mod_base = cm
  modified_base 34: mod_base = um
  modified_base 35: mod_base = gm
  modified_base 36: mod_base = cm
  source 1..36: mol_type = other RNA

SEQ ID NO: 825 - RNA, 36 nt, synthetic construct; identical to SEQ ID NO: 807
  misc_feature 1^2: note = linked via phosphorothioate
  modified_base 1: mod_base = OTHER; note = 2'-O-methyl-adenosine
  modified_base 2: mod_base = cm
  modified_base 3: mod_base = OTHER; note = 2'-O-methyl-adenosine
  modified_base 4: mod_base = um
  modified_base 5: mod_base = OTHER; note = 2'-O-methyl-adenosine
  modified_base 6: mod_base = cm
  modified_base 7: mod_base = um
  modified_base 8: mod_base = OTHER; note = 2'-Fluoro-guanosine
  modified_base 9: mod_base = OTHER; note = 2'-Fluoro-guanosine
  modified_base 10: mod_base = OTHER; note = 2'-Fluoro-adenosine
  modified_base 11: mod_base = OTHER; note = 2'-Fluoro-uridine
  modified_base 12: mod_base = cm
  modified_base 13: mod_base = OTHER; note = 2'-O-methyl-adenosine
  modified_base 14: mod_base = cm
  modified_base 15: mod_base = um
  modified_base 16: mod_base = OTHER; note = 2'-O-methyl-adenosine
  modified_base 17: mod_base = um
  modified_base 18: mod_base = OTHER; note = 2'-O-methyl-adenosine
  modified_base 19: mod_base = cm
  modified_base 20: mod_base = OTHER; note = 2'-O-methyl-adenosine
  modified_base 21: mod_base = gm
  modified_base 22: mod_base = cm
  modified_base 23: mod_base = OTHER; note = 2'-O-methyl-adenosine
  modified_base 24: mod_base = gm
  modified_base 25: mod_base = cm
  modified_base 26: mod_base = cm
  modified_base 27: mod_base = gm
  modified_base 28: mod_base = OTHER; note = aminodiethoxymethanol-adenosine-N-acetylgalactosamine
  modified_base 29: mod_base = OTHER; note = aminodiethoxymethanol-adenosine-N-acetylgalactosamine
  modified_base 30: mod_base = OTHER; note = aminodiethoxymethanol-adenosine-N-acetylgalactosamine
  modified_base 31: mod_base = gm
  modified_base 32: mod_base = gm
  modified_base 33: mod_base = cm
  modified_base 34: mod_base = um
  modified_base 35: mod_base = gm
  modified_base 36: mod_base = cm
  source 1..36: mol_type = other RNA

SEQ ID NO: 826 - RNA, 36 nt, synthetic construct; identical to SEQ ID NO: 808
  misc_feature 1^2: note = linked via phosphorothioate
  modified_base 1: mod_base = cm
  modified_base 2: mod_base = OTHER; note = 2'-O-methyl-adenosine
  modified_base 3: mod_base = um
  modified_base 4: mod_base = OTHER; note = 2'-O-methyl-adenosine
  modified_base 5: mod_base = cm
  modified_base 6: mod_base = um
  modified_base 7: mod_base = gm
  modified_base 8: mod_base = OTHER; note = 2'-Fluoro-guanosine
  modified_base 9: mod_base = OTHER; note = 2'-Fluoro-adenosine
  modified_base 10: mod_base = OTHER; note = 2'-Fluoro-uridine
  modified_base 11: mod_base = OTHER; note = 2'-Fluoro-cytidine
  modified_base 12: mod_base = OTHER; note = 2'-O-methyl-adenosine
  modified_base 13: mod_base = cm
  modified_base 14: mod_base = um
  modified_base 15: mod_base = OTHER; note = 2'-O-methyl-adenosine
  modified_base 16: mod_base = um
  modified_base 17: mod_base = OTHER; note = 2'-O-methyl-adenosine
  modified_base 18: mod_base = cm
  modified_base 19: mod_base = um
  modified_base 20: mod_base = OTHER; note = 2'-O-methyl-adenosine
  modified_base 21: mod_base = gm
  modified_base 22: mod_base = cm
  modified_base 23: mod_base = OTHER; note = 2'-O-methyl-adenosine
  modified_base 24: mod_base = gm
  modified_base 25: mod_base = cm
  modified_base 26: mod_base = cm
  modified_base 27: mod_base = gm
  modified_base 28: mod_base = OTHER; note = aminodiethoxymethanol-adenosine-N-acetylgalactosamine
  modified_base 29: mod_base = OTHER; note = aminodiethoxymethanol-adenosine-N-acetylgalactosamine
  modified_base 30: mod_base = OTHER; note = aminodiethoxymethanol-adenosine-N-acetylgalactosamine
  modified_base 31: mod_base = gm
  modified_base 32: mod_base = gm
  modified_base 33: mod_base = cm
  modified_base 34: mod_base = um
  modified_base 35: mod_base = gm
  modified_base 36: mod_base = cm
  source 1..36: mol_type = other RNA

SEQ ID NO: 827 - RNA, 36 nt, synthetic construct; identical to SEQ ID NO: 809
  misc_feature 1^2: note = linked via phosphorothioate
  modified_base 1: mod_base = cm
  modified_base 2: mod_base = um
  modified_base 3: mod_base = gm
  modified_base 4: mod_base = gm
  modified_base 5: mod_base = OTHER; note = 2'-O-methyl-adenosine
  modified_base 6: mod_base = um
  modified_base 7: mod_base = cm
  modified_base 8: mod_base = OTHER; note = 2'-Fluoro-adenosine
  modified_base 9: mod_base = OTHER; note = 2'-Fluoro-cytidine
  modified_base 10: mod_base = OTHER; note = 2'-Fluoro-uridine
  modified_base 11: mod_base = OTHER; note = 2'-Fluoro-adenosine
  modified_base 12: mod_base = um
  modified_base 13: mod_base = OTHER; note = 2'-O-methyl-adenosine
  modified_base 14: mod_base = cm
  modified_base 15: mod_base = um
  modified_base 16: mod_base = OTHER; note = 2'-O-methyl-adenosine
  modified_base 17: mod_base = OTHER; note = 2'-O-methyl-adenosine
  modified_base 18: mod_base = gm
  modified_base 19: mod_base = OTHER; note = 2'-O-methyl-adenosine
  modified_base 20: mod_base = OTHER; note = 2'-O-methyl-adenosine
  modified_base 21: mod_base = gm
  modified_base 22: mod_base = cm
  modified_base 23: mod_base = OTHER; note = 2'-O-methyl-adenosine
  modified_base 24: mod_base = gm
  modified_base 25: mod_base = cm
  modified_base 26: mod_base = cm
  modified_base 27: mod_base = gm
  modified_base 28: mod_base = OTHER; note = aminodiethoxymethanol-adenosine-N-acetylgalactosamine
  modified_base 29: mod_base = OTHER; note = aminodiethoxymethanol-adenosine-N-acetylgalactosamine
  modified_base 30: mod_base = OTHER; note = aminodiethoxymethanol-adenosine-N-acetylgalactosamine
  modified_base 31: mod_base = gm
  modified_base 32: mod_base = gm
  modified_base 33: mod_base = cm
  modified_base 34: mod_base = um
  modified_base 35: mod_base = gm
  modified_base 36: mod_base = cm
  source 1..36: mol_type = other RNA

SEQ ID NO: 828 - RNA, 36 nt, synthetic construct; identical to SEQ ID NO: 810
  misc_feature 1^2: note = linked via phosphorothioate
  modified_base 1: mod_base = OTHER; note = 2'-O-methyl-adenosine
  modified_base 2: mod_base = um
  modified_base 3: mod_base = OTHER; note = 2'-O-methyl-adenosine
  modified_base 4: mod_base = um
  modified_base 5: mod_base = gm
  modified_base 6: mod_base = um
  modified_base 7: mod_base = gm
  modified_base 8: mod_base = OTHER; note = 2'-Fluoro-uridine
  modified_base 9: mod_base = OTHER; note = 2'-Fluoro-guanosine
  modified_base 10: mod_base = OTHER; note = 2'-Fluoro-guanosine
  modified_base 11: mod_base = OTHER; note = 2'-Fluoro-adenosine
  modified_base 12: mod_base = um
  modified_base 13: mod_base = um
  modified_base 14: mod_base = um
  modified_base 15: mod_base = gm
  modified_base 16: mod_base = um
  modified_base 17: mod_base = gm
  modified_base 18: mod_base = OTHER; note = 2'-O-methyl-adenosine
  modified_base 19: mod_base = um
  modified_base 20: mod_base = OTHER; note = 2'-O-methyl-adenosine
  modified_base 21: mod_base = gm
  modified_base 22: mod_base = cm
  modified_base 23: mod_base = OTHER; note = 2'-O-methyl-adenosine
  modified_base 24: mod_base = gm
  modified_base 25: mod_base = cm
  modified_base 26: mod_base = cm
  modified_base 27: mod_base = gm
  modified_base 28: mod_base = OTHER; note = aminodiethoxymethanol-adenosine-N-acetylgalactosamine
  modified_base 29: mod_base = OTHER; note = aminodiethoxymethanol-adenosine-N-acetylgalactosamine
  modified_base 30: mod_base = OTHER; note = aminodiethoxymethanol-adenosine-N-acetylgalactosamine
  modified_base 31: mod_base = gm
  modified_base 32: mod_base = gm
  modified_base 33: mod_base = cm
  modified_base 34: mod_base = um
  modified_base 35: mod_base = gm
  modified_base 36: mod_base = cm
  source 1..36: mol_type = other RNA

SEQ ID NO: 829 - RNA, 36 nt, synthetic construct; identical to SEQ ID NO: 811
  misc_feature 1^2: note = linked via phosphorothioate
  modified_base 1: mod_base = OTHER; note = 2'-O-methyl-adenosine
  modified_base 2: mod_base = gm
  modified_base 3: mod_base = gm
  modified_base 4: mod_base = OTHER; note = 2'-O-methyl-adenosine
  modified_base 5: mod_base = um
  modified_base 6: mod_base = OTHER; note = 2'-O-methyl-adenosine
  modified_base 7: mod_base = OTHER; note = 2'-O-methyl-adenosine
  modified_base 8: mod_base = OTHER; note = 2'-Fluoro-uridine
  modified_base 9: mod_base = OTHER; note = 2'-Fluoro-guanosine
  modified_base 10: mod_base = OTHER; note = 2'-Fluoro-cytidine
  modified_base 11: mod_base = OTHER; note = 2'-Fluoro-adenosine
  modified_base 12: mod_base = gm
  modified_base 13: mod_base = OTHER; note = 2'-O-methyl-adenosine
  modified_base 14: mod_base = OTHER; note = 2'-O-methyl-adenosine
  modified_base 15: mod_base = gm
  modified_base 16: mod_base = um
  modified_base 17: mod_base = OTHER; note = 2'-O-methyl-adenosine
  modified_base 18: mod_base = cm
  modified_base 19: mod_base = OTHER; note = 2'-O-methyl-adenosine
  modified_base 20: mod_base = OTHER; note = 2'-O-methyl-adenosine
  modified_base 21: mod_base = gm
  modified_base 22: mod_base = cm
  modified_base 23: mod_base = OTHER; note = 2'-O-methyl-adenosine
  modified_base 24: mod_base = gm
  modified_base 25: mod_base = cm
  modified_base 26: mod_base = cm
  modified_base 27: mod_base = gm
  modified_base 28: mod_base = OTHER; note = aminodiethoxymethanol-adenosine-N-acetylgalactosamine
  modified_base 29: mod_base = OTHER; note = aminodiethoxymethanol-adenosine-N-acetylgalactosamine
  modified_base 30: mod_base = OTHER; note = aminodiethoxymethanol-adenosine-N-acetylgalactosamine
  modified_base 31: mod_base = gm
  modified_base 32: mod_base = gm
  modified_base 33: mod_base = cm
  modified_base 34: mod_base = um
  modified_base 35: mod_base = gm
  modified_base 36: mod_base = cm
  source 1..36: mol_type = other RNA

SEQ ID NO: 830 - RNA, 36 nt, synthetic construct; identical to SEQ ID NO: 812
  misc_feature 1^2: note = linked via phosphorothioate
  modified_base 1: mod_base = OTHER; note = 2'-O-methyl-adenosine
  modified_base 2: mod_base = gm
  modified_base 3: mod_base = cm
  modified_base 4: mod_base = OTHER; note = 2'-O-methyl-adenosine
  modified_base 5: mod_base = um
  modified_base 6: mod_base = OTHER; note = 2'-O-methyl-adenosine
  modified_base 7: mod_base = gm
  modified_base 8: mod_base = OTHER; note = 2'-Fluoro-cytidine
  modified_base 9: mod_base = OTHER; note = 2'-Fluoro-adenosine
  modified_base 10: mod_base = OTHER; note = 2'-Fluoro-cytidine
  modified_base 11: mod_base = OTHER; note = 2'-Fluoro-adenosine
  modified_base 12: mod_base = gm
  modified_base 13: mod_base = um
  modified_base 14: mod_base = um
  modified_base 15: mod_base = OTHER; note = 2'-O-methyl-adenosine
  modified_base 16: mod_base = OTHER; note = 2'-O-methyl-adenosine
  modified_base 17: mod_base = um
  modified_base 18: mod_base = gm
  modified_base 19: mod_base = gm
  modified_base 20: mod_base = OTHER; note = 2'-O-methyl-adenosine
  modified_base 21: mod_base = gm
  modified_base 22: mod_base = cm
  modified_base 23: mod_base = OTHER; note = 2'-O-methyl-adenosine
  modified_base 24: mod_base = gm
  modified_base 25: mod_base = cm
  modified_base 26: mod_base = cm
  modified_base 27: mod_base = gm
  modified_base 28: mod_base = OTHER; note = aminodiethoxymethanol-adenosine-N-acetylgalactosamine
  modified_base 29: mod_base = OTHER; note = aminodiethoxymethanol-adenosine-N-acetylgalactosamine
  modified_base 30: mod_base = OTHER; note = aminodiethoxymethanol-adenosine-N-acetylgalactosamine
  modified_base 31: mod_base = gm
  modified_base 32: mod_base = gm
  modified_base 33: mod_base = cm
  modified_base 34: mod_base = um
  modified_base 35: mod_base = gm
  modified_base 36: mod_base = cm
  source 1..36: mol_type = other RNA

SEQ ID NO: 831 - RNA, 22 nt, synthetic construct
  misc_feature 1..3: note = linked via phosphorothioate
  modified_base 1: mod_base = OTHER; note = 4'-O-monomethylphosphonate-2'-O-methylmethyluridine
  modified_base 2: mod_base = OTHER; note = 2'-Fluoro-uridine
  modified_base 3: mod_base = OTHER; note = 2'-Fluoro-guanosine
  modified_base 4: mod_base = OTHER; note = 2'-Fluoro-guanosine
  modified_base 5: mod_base = OTHER; note = 2'-Fluoro-cytidine
  modified_base 6: mod_base = um
  modified_base 7: mod_base = OTHER; note = 2'-Fluoro-uridine
  modified_base 8: mod_base = um
  modified_base 9: mod_base = cm
  modified_base 10: mod_base = OTHER; note = 2'-Fluoro-adenosine
  modified_base 11: mod_base = OTHER; note = 2'-O-methyl-adenosine
  modified_base 12: mod_base = OTHER; note = 2'-O-methyl-adenosine
  modified_base 13: mod_base = cm
  modified_base 14: mod_base = OTHER; note = 2'-Fluoro-adenosine
  modified_base 15: mod_base = um
  modified_base 16: mod_base = OTHER; note = 2'-O-methyl-adenosine
  modified_base 17: mod_base = OTHER; note = 2'-O-methyl-adenosine
  modified_base 18: mod_base = um
  modified_base 19: mod_base = um
  misc_feature 20..22: note = linked via phosphorothioate
  modified_base 20: mod_base = gm
  modified_base 21: mod_base = gm
  modified_base 22: mod_base = gm
  source 1..22: mol_type = other RNA
ttggctttcaaacataattggg

SEQ ID NO: 832 - RNA, 22 nt, synthetic construct
  misc_feature 1..3: note = linked via phosphorothioate
  modified_base 1: mod_base = OTHER; note = 4'-O-monomethylphosphonate-2'-O-methylmethyluridine
  modified_base 2: mod_base = OTHER; note = 2'-Fluoro-adenosine
  modified_base 3: mod_base = OTHER; note = 2'-Fluoro-uridine
  modified_base 4: mod_base = OTHER; note = 2'-Fluoro-guanosine
  modified_base 5: mod_base = OTHER; note = 2'-Fluoro-guanosine
  modified_base 6: mod_base = cm
  modified_base 7: mod_base = OTHER; note = 2'-Fluoro-uridine
  modified_base 8: mod_base = um
  modified_base 9: mod_base = um
  modified_base 10: mod_base = OTHER; note = 2'-Fluoro-cytidine
  modified_base 11: mod_base = OTHER; note = 2'-O-methyl-adenosine
  modified_base 12: mod_base = OTHER; note = 2'-O-methyl-adenosine
  modified_base 13: mod_base = OTHER; note = 2'-O-methyl-adenosine
  modified_base 14: mod_base = OTHER; note = 2'-Fluoro-cytidine
  modified_base 15: mod_base = OTHER; note = 2'-O-methyl-adenosine
  modified_base 16: mod_base = um
  modified_base 17: mod_base = OTHER; note = 2'-O-methyl-adenosine
  modified_base 18: mod_base = OTHER; note = 2'-O-methyl-adenosine
  modified_base 19: mod_base = um
  misc_feature 20..22: note = linked via phosphorothioate
  modified_base 20: mod_base = um
  modified_base 21: mod_base = gm
  modified_base 22: mod_base = gm
  source 1..22: mol_type = other RNA
tatggctttcaaacataattgg

SEQ ID NO: 833 - RNA, 22 nt, synthetic construct
  misc_feature 1..3: note = linked via phosphorothioate
  modified_base 1: mod_base = OTHER; note = 4'-O-monomethylphosphonate-2'-O-methylmethyluridine
  modified_base 2: mod_base = OTHER; note = 2'-Fluoro-uridine
  modified_base 3: mod_base = OTHER; note = 2'-Fluoro-adenosine
  modified_base 4: mod_base = OTHER; note = 2'-Fluoro-guanosine
  modified_base 5: mod_base = OTHER; note = 2'-Fluoro-uridine
  modified_base 6: mod_base = gm
  modified_base 7: mod_base = OTHER; note = 2'-Fluoro-adenosine
  modified_base 8: mod_base = um
  modified_base 9: mod_base = cm
  modified_base 10: mod_base = OTHER; note = 2'-Fluoro-cytidine
  modified_base 11: mod_base = OTHER; note = 2'-O-methyl-adenosine
  modified_base 12: mod_base = gm
  modified_base 13: mod_base = um
  modified_base 14: mod_base = OTHER; note = 2'-Fluoro-adenosine
  modified_base 15: mod_base = um
  modified_base 16: mod_base = gm
  modified_base 17: mod_base = um
  modified_base 18: mod_base = cm
  modified_base 19: mod_base = OTHER; note = 2'-O-methyl-adenosine
  misc_feature 20..22: note = linked via phosphorothioate
  modified_base 20: mod_base = OTHER; note = 2'-O-methyl-adenosine
  modified_base 21: mod_base = gm
  modified_base 22: mod_base = gm
  source 1..22: mol_type = other RNA
ttagtgatccagtatgtcaagg

SEQ ID NO: 834 - RNA, 22 nt, synthetic construct
  misc_feature 1..3: note = linked via phosphorothioate
  modified_base 1: mod_base = OTHER; note = 4'-O-monomethylphosphonate-2'-O-methylmethyluridine
  modified_base 2: mod_base = OTHER; note = 2'-Fluoro-guanosine
  modified_base 3: mod_base = OTHER; note = 2'-Fluoro-uridine
  modified_base 4: mod_base = OTHER; note = 2'-Fluoro-adenosine
  modified_base 5: mod_base = OTHER; note = 2'-Fluoro-uridine
  modified_base 6: mod_base = OTHER; note = 2'-O-methyl-adenosine
  modified_base 7: mod_base = OTHER; note = 2'-Fluoro-guanosine
  modified_base 8: mod_base = um
  modified_base 9: mod_base = gm
  modified_base 10: mod_base = OTHER; note = 2'-Fluoro-adenosine
  modified_base 11: mod_base = um
  modified_base 12: mod_base = cm
  modified_base 13: mod_base = cm
  modified_base 14: mod_base = OTHER; note = 2'-Fluoro-adenosine
  modified_base 15: mod_base = gm
  modified_base 16: mod_base = um
  modified_base 17: mod_base = OTHER; note = 2'-O-methyl-adenosine
  modified_base 18: mod_base = um
  modified_base 19: mod_base = gm
  misc_feature 20..22: note = linked via phosphorothioate
  modified_base 20: mod_base = um
  modified_base 21: mod_base = gm
  modified_base 22: mod_base = gm
  source 1..22: mol_type = other RNA
tgtatagtgatccagtatgtgg

SEQ ID NO: 835 - RNA, 22 nt, synthetic construct
  misc_feature 1..3: note = linked via phosphorothioate
  modified_base 1: mod_base = OTHER; note = 4'-O-monomethylphosphonate-2'-O-methylmethyluridine
  modified_base 2: mod_base = OTHER; note = 2'-Fluoro-adenosine
  modified_base 3: mod_base = OTHER; note = 2'-Fluoro-guanosine
  modified_base 4: mod_base = OTHER; note = 2'-Fluoro-uridine
  modified_base 5: mod_base = OTHER; note = 2'-Fluoro-adenosine
  modified_base 6: mod_base = um
  modified_base 7: mod_base = OTHER; note = 2'-Fluoro-adenosine
  modified_base 8: mod_base = gm
  modified_base 9: mod_base = um
  modified_base 10: mod_base = OTHER; note = 2'-Fluoro-guanosine
  modified_base 11: mod_base = OTHER; note = 2'-O-methyl-adenosine
  modified_base 12: mod_base = um
  modified_base 13: mod_base = cm
  modified_base 14: mod_base = OTHER; note = 2'-Fluoro-cytidine
  modified_base 15: mod_base = OTHER; note = 2'-O-methyl-adenosine
  modified_base 16: mod_base = gm
  modified_base 17: mod_base = um
  modified_base 18: mod_base = OTHER; note = 2'-O-methyl-adenosine
  modified_base 19: mod_base = um
  misc_feature 20..22: note = linked via phosphorothioate
  modified_base 20: mod_base = gm
  modified_base 21: mod_base = gm
  modified_base 22: mod_base = gm
  source 1..22: mol_type = other RNA
tagtatagtgatccagtatggg

SEQ ID NO: 836 - RNA, 22 nt, synthetic construct
  misc_feature 1..3: note = linked via phosphorothioate
  modified_base 1: mod_base = OTHER; note = 4'-O-monomethylphosphonate-2'-O-methylmethyluridine
  modified_base 2: mod_base = OTHER; note = 2'-Fluoro-uridine
  modified_base 3: mod_base = OTHER; note = 2'-Fluoro-cytidine
  modified_base 4: mod_base = OTHER; note = 2'-Fluoro-uridine
  modified_base 5: mod_base = OTHER; note = 2'-Fluoro-uridine
  modified_base 6: mod_base = OTHER; note = 2'-O-methyl-adenosine
  modified_base 7: mod_base = OTHER; note = 2'-Fluoro-guanosine
  modified_base 8: mod_base = um
  modified_base 9: mod_base = OTHER; note = 2'-O-methyl-adenosine
  modified_base 10: mod_base = OTHER; note = 2'-Fluoro-uridine
  modified_base 11: mod_base = OTHER; note = 2'-O-methyl-adenosine
  modified_base 12: mod_base = gm
  modified_base 13: mod_base = um
  modified_base 14: mod_base = OTHER; note = 2'-Fluoro-guanosine
  modified_base 15: mod_base = OTHER; note = 2'-O-methyl-adenosine
  modified_base 16: mod_base = um
  modified_base 17: mod_base = cm
  modified_base 18: mod_base = cm
  modified_base 19: mod_base = OTHER; note = 2'-O-methyl-adenosine
  misc_feature 20..22: note = linked via phosphorothioate
  modified_base 20: mod_base = gm
  modified_base 21: mod_base = gm
  modified_base 22: mod_base = gm
  source 1..22: mol_type = other RNA
ttcttagtatagtgatccaggg

SEQ ID NO: 837 - RNA, 22 nt, synthetic construct
  misc_feature 1..3: note = linked via phosphorothioate
  modified_base 1: mod_base = OTHER; note = 4'-O-monomethylphosphonate-2'-O-methylmethyluridine
  modified_base 2: mod_base = OTHER; note = 2'-Fluoro-adenosine
  modified_base 3: mod_base = OTHER; note = 2'-Fluoro-uridine
  modified_base 4: mod_base = OTHER; note = 2'-Fluoro-cytidine
  modified_base 5: mod_base = OTHER; note = 2'-Fluoro-adenosine
  modified_base 6: mod_base = cm
  modified_base 7: mod_base = OTHER; note = 2'-Fluoro-adenosine
  modified_base 8: mod_base = OTHER; note = 2'-O-methyl-adenosine
  modified_base 9: mod_base = OTHER; note = 2'-O-methyl-adenosine
  modified_base 10: mod_base = OTHER; note = 2'-Fluoro-uridine
  modified_base 11: mod_base = cm
  modified_base 12: mod_base = cm
  modified_base 13: mod_base = OTHER; note = 2'-O-methyl-adenosine
  modified_base 14: mod_base = OTHER; note = 2'-Fluoro-cytidine
  modified_base 15: mod_base = OTHER; note = 2'-O-methyl-adenosine
  modified_base 16: mod_base = cm
  modified_base 17: mod_base = OTHER; note = 2'-O-methyl-adenosine
  modified_base 18: mod_base = um
  modified_base 19: mod_base = OTHER; note = 2'-O-methyl-adenosine
  misc_feature 20..22: note = linked via phosphorothioate
  modified_base 20: mod_base = um
  modified_base 21: mod_base = gm
  modified_base 22: mod_base = gm
  source 1..22: mol_type = other RNA
tatcacaaatccacacatatgg

SEQ ID NO: 838 - RNA, 22 nt, synthetic construct
  misc_feature 1..3: note = linked via phosphorothioate
  modified_base 1: mod_base = OTHER; note = 4'-O-monomethylphosphonate-2'-O-methylmethyluridine
  modified_base 2: mod_base = OTHER; note = 2'-Fluoro-uridine
  modified_base 3: mod_base = OTHER; note = 2'-Fluoro-guanosine
  modified_base 4: mod_base = OTHER; note = 2'-Fluoro-uridine
  modified_base 5: mod_base = OTHER; note = 2'-Fluoro-adenosine
  modified_base 6: mod_base = cm
  modified_base 7: mod_base = OTHER; note = 2'-Fluoro-uridine
  modified_base 8: mod_base = um
  modified_base 9: mod_base = cm
  modified_base 10: mod_base = OTHER; note = 2'-Fluoro-uridine
  modified_base 11: mod_base = gm
  modified_base 12: mod_base = cm
  modified_base 13: mod_base = OTHER; note = 2'-O-methyl-adenosine
  modified_base 14: mod_base = OTHER; note = 2'-Fluoro-uridine
  modified_base 15: mod_base = um
  modified_base 16: mod_base = OTHER; note = 2'-O-methyl-adenosine
  modified_base 17: mod_base = um
  modified_base 18: mod_base = cm
  modified_base 19: mod_base = cm
  misc_feature 20..22: note = linked via phosphorothioate
  modified_base 20: mod_base = um
  modified_base 21: mod_base = gm
  modified_base 22: mod_base = gm
  source 1..22: mol_type = other RNA
ttgtacttctgcattatcctgg

SEQ ID NO: 839 - RNA, 22 nt, synthetic construct
  misc_feature 1..3: note = linked via phosphorothioate
  modified_base 1: mod_base = OTHER; note = 4'-O-monomethylphosphonate-2'-O-methylmethyluridine
  modified_base 2: mod_base = OTHER; note = 2'-Fluoro-cytidine
  modified_base 3: mod_base = OTHER; note = 2'-Fluoro-cytidine
  modified_base 4: mod_base = OTHER; note = 2'-Fluoro-adenosine
  modified_base 5: mod_base = OTHER; note = 2'-Fluoro-uridine
  modified_base 6: mod_base = um
  modified_base 7: mod_base = OTHER; note = 2'-Fluoro-adenosine
  modified_base 8: mod_base = OTHER; note = 2'-O-methyl-adenosine
  modified_base 9: mod_base = cm
  modified_base 10: mod_base = OTHER; note = 2'-Fluoro-uridine
  modified_base 11: mod_base = gm
  modified_base 12: mod_base = um
  modified_base 13: mod_base = gm
  modified_base 14: mod_base = OTHER; note = 2'-Fluoro-cytidine
  modified_base 15: mod_base = um
  modified_base 16: mod_base = OTHER; note = 2'-O-methyl-adenosine
  modified_base 17: mod_base = um
  modified_base 18: mod_base = gm
  modified_base 19: mod_base = cm
  misc_feature 20..22: note = linked via phosphorothioate
  modified_base 20: mod_base = um
  modified_base 21: mod_base = gm
  modified_base 22: mod_base = gm
  source 1..22: mol_type = other RNA
tccattaactgtgctatgctgg

SEQ ID NO: 840 - RNA, 22 nt, synthetic construct
  misc_feature 1..4: note = linked via phosphorothioate
  modified_base 1: mod_base = OTHER; note = 4'-O-monomethylphosphonate-2'-O-methylmethyluridine
  modified_base 2: mod_base = OTHER; note = 2'-Fluoro-uridine
  modified_base 3: mod_base = OTHER; note = 2'-Fluoro-guanosine
  modified_base 4: mod_base = OTHER; note = 2'-Fluoro-guanosine
  modified_base 5: mod_base = OTHER; note = 2'-Fluoro-cytidine
  modified_base 6: mod_base = um
  modified_base 7: mod_base = OTHER; note = 2'-Fluoro-uridine
  modified_base 8: mod_base = um
  modified_base 9: mod_base = cm
  modified_base 10: mod_base = OTHER; note = 2'-Fluoro-adenosine
  modified_base 11: mod_base = OTHER; note = 2'-O-methyl-adenosine
  modified_base 12: mod_base = OTHER; note = 2'-O-methyl-adenosine
  modified_base 13: mod_base = cm
  modified_base 14: mod_base = OTHER; note = 2'-Fluoro-adenosine
  modified_base 15: mod_base = um
  modified_base 16: mod_base = OTHER; note = 2'-O-methyl-adenosine
  modified_base 17: mod_base = OTHER; note = 2'-O-methyl-adenosine
  modified_base 18: mod_base = um
  modified_base 19: mod_base = um
  misc_feature 20..22: note = linked via phosphorothioate
  modified_base 20: mod_base = gm
  modified_base 21: mod_base = gm
  modified_base 22: mod_base = gm
  source 1..22: mol_type = other RNA
ttggctttcaaacataattggg

SEQ ID NO: 841 - RNA, 36 nt, synthetic construct; identical to SEQ ID NO: 580
  misc_feature 1^2: note = linked via phosphorothioate
  modified_base 1: mod_base = cm
  modified_base 2: mod_base = OTHER; note = 2'-O-methyl-adenosine
  modified_base 3: mod_base = OTHER; note = 2'-O-methyl-adenosine
  modified_base 4: mod_base = um
  modified_base 5: mod_base = um
  modified_base 6: mod_base = OTHER; note = 2'-O-methyl-adenosine
  modified_base 7: mod_base = um
  modified_base 8: mod_base = OTHER; note = 2'-Fluoro-guanosine
  modified_base 9: mod_base = OTHER; note = 2'-Fluoro-uridine
  modified_base 10: mod_base = OTHER; note = 2'-Fluoro-uridine
  modified_base 11: mod_base = OTHER; note = 2'-Fluoro-uridine
  modified_base 12: mod_base = gm
  modified_base 13: mod_base = OTHER; note = 2'-O-methyl-adenosine
  modified_base 14: mod_base = OTHER; note = 2'-O-methyl-adenosine
  modified_base 15: mod_base = OTHER; note = 2'-O-methyl-adenosine
  modified_base 16: mod_base = gm
  modified_base 17: mod_base = cm
  modified_base 18: mod_base = cm
  modified_base 19: mod_base = OTHER; note = 2'-O-methyl-adenosine
  modified_base 20: mod_base = OTHER; note = 2'-O-methyl-adenosine
  modified_base 21: mod_base = gm
  modified_base 22: mod_base = cm
  modified_base 23: mod_base = OTHER; note = 2'-O-methyl-adenosine
  modified_base 24: mod_base = gm
  modified_base 25: mod_base = cm
  modified_base 26: mod_base = cm
  modified_base 27: mod_base = gm
  modified_base 28: mod_base = OTHER; note = 2'-O-methyl-adenosine
  modified_base 29: mod_base = OTHER; note = 2'-O-methyl-adenosine
  modified_base 30: mod_base = OTHER; note = 2'-O-methyl-adenosine
  modified_base 31: mod_base = gm
  modified_base 32: mod_base = gm
  modified_base 33: mod_base = cm
  modified_base 34: mod_base = um
  modified_base 35: mod_base = gm
  modified_base 36: mod_base = cm
  source 1..36: mol_type = other RNA

SEQ ID NO: 842 - RNA, 36 nt, synthetic construct; identical to SEQ ID NO: 580
  misc_feature 1^2: note = linked via phosphorothioate
  modified_base 1: mod_base = cm
  modified_base 2: mod_base = OTHER; note = hexadecanamidodiethoxymethanol-adenosine
  modified_base 3: mod_base = OTHER; note = 2'-O-methyl-adenosine
  modified_base 4: mod_base = um
  modified_base 5: mod_base = um
  modified_base 6: mod_base = OTHER; note = 2'-O-methyl-adenosine
  modified_base 7: mod_base = um
  modified_base 8: mod_base = OTHER; note = 2'-Fluoro-guanosine
  modified_base 9: mod_base = OTHER; note = 2'-Fluoro-uridine
  modified_base 10: mod_base = OTHER; note = 2'-Fluoro-uridine
  modified_base 11: mod_base = OTHER; note = 2'-Fluoro-uridine
  modified_base 12: mod_base = gm
  modified_base 13: mod_base = OTHER; note = 2'-O-methyl-adenosine
  modified_base 14: mod_base = OTHER; note = 2'-O-methyl-adenosine
  modified_base 15: mod_base = OTHER; note = 2'-O-methyl-adenosine
  modified_base 16: mod_base = gm
  modified_base 17: mod_base = cm
  modified_base 18: mod_base = cm
  modified_base 19: mod_base = OTHER; note = 2'-O-methyl-adenosine
  modified_base 20: mod_base = OTHER; note = 2'-O-methyl-adenosine
  modified_base 21: mod_base = gm
  modified_base 22: mod_base = cm
  modified_base 23: mod_base = OTHER; note = 2'-O-methyl-adenosine
  modified_base 24: mod_base = gm
  modified_base 25: mod_base = cm
  modified_base 26: mod_base = cm
  modified_base 27: mod_base = gm
  modified_base 28: mod_base = OTHER; note = 2'-O-methyl-adenosine
  modified_base 29: mod_base = OTHER; note = 2'-O-methyl-adenosine
  modified_base 30: mod_base = OTHER; note = 2'-O-methyl-adenosine
  modified_base 31: mod_base = gm
  modified_base 32: mod_base = gm
  modified_base 33: mod_base = cm
  modified_base 34: mod_base = um
  modified_base 35: mod_base = gm
  modified_base 36: mod_base = cm
  source 1..36: mol_type = other RNA

SEQ ID NO: 843 - RNA, 36 nt, synthetic construct; identical to SEQ ID NO: 580
  misc_feature 1^2: note = linked via phosphorothioate
  modified_base 1: mod_base = cm
  modified_base 2: mod_base = OTHER; note = 2'-O-methyl-adenosine
  modified_base 3: mod_base = OTHER; note = hexadecanamidodiethoxymethanol-adenosine
  modified_base 4: mod_base = um
  modified_base 5: mod_base = um
  modified_base 6: mod_base = OTHER; note = 2'-O-methyl-adenosine
  modified_base 7: mod_base = um
  modified_base 8: mod_base = OTHER; note = 2'-Fluoro-guanosine
  modified_base 9: mod_base = OTHER; note = 2'-Fluoro-uridine
  modified_base 10: mod_base = OTHER; note = 2'-Fluoro-uridine
  modified_base 11: mod_base = OTHER; note = 2'-Fluoro-uridine
  modified_base 12: mod_base = gm
  modified_base 13: mod_base = OTHER; note = 2'-O-methyl-adenosine
  modified_base 14: mod_base = OTHER; note = 2'-O-methyl-adenosine
  modified_base 15: mod_base = OTHER; note = 2'-O-methyl-adenosine
  modified_base 16: mod_base = gm
  modified_base 17: mod_base = cm
  modified_base 18: mod_base = cm
  modified_base 19: mod_base = OTHER; note = 2'-O-methyl-adenosine
  modified_base 20: mod_base = OTHER; note = 2'-O-methyl-adenosine
  modified_base 21: mod_base = gm
  modified_base 22: mod_base = cm
  modified_base 23: mod_base = OTHER; note = 2'-O-methyl-adenosine
  modified_base 24: mod_base = gm
  modified_base 25: mod_base = cm
  modified_base 26: mod_base = cm
  modified_base 27: mod_base = gm
  modified_base 28: mod_base = OTHER; note = 2'-O-methyl-adenosine
  modified_base 29: mod_base = OTHER; note = 2'-O-methyl-adenosine
  modified_base 30: mod_base = OTHER; note = 2'-O-methyl-adenosine
  modified_base 31: mod_base = gm
  modified_base 32: mod_base = gm
  modified_base 33: mod_base = cm
  modified_base 34: mod_base = um
  modified_base 35: mod_base = gm
  modified_base 36: mod_base = cm
  source 1..36: mol_type = other RNA

SEQ ID NO: 844 - RNA, 36 nt, synthetic construct; identical to SEQ ID NO: 580
  misc_feature 1^2: note = linked via phosphorothioate
  modified_base 1: mod_base = cm
  modified_base 2: mod_base = OTHER; note = 2'-O-methyl-adenosine
  modified_base 3: mod_base = OTHER; note = 2'-O-methyl-adenosine
  modified_base 4: mod_base = um
  modified_base 5: mod_base = um
  modified_base 6: mod_base = OTHER; note = hexadecanamidodiethoxymethanol-adenosine
  modified_base 7: mod_base = um
  modified_base 8: mod_base = OTHER; note = 2'-Fluoro-guanosine
  modified_base 9: mod_base = OTHER; note = 2'-Fluoro-uridine
  modified_base 10: mod_base = OTHER; note = 2'-Fluoro-uridine
  modified_base 11: mod_base = OTHER; note = 2'-Fluoro-uridine
  modified_base 12: mod_base = gm
  modified_base 13: mod_base = OTHER; note = 2'-O-methyl-adenosine
  modified_base 14: mod_base = OTHER; note = 2'-O-methyl-adenosine
  modified_base 15: mod_base = OTHER; note = 2'-O-methyl-adenosine
  modified_base 16: mod_base = gm
  modified_base 17: mod_base = cm
  modified_base 18: mod_base = cm
  modified_base 19: mod_base = OTHER; note = 2'-O-methyl-adenosine
  modified_base 20: mod_base = OTHER; note = 2'-O-methyl-adenosine
  modified_base 21: mod_base = gm
  modified_base 22: mod_base = cm
  modified_base 23: mod_base = OTHER; note = 2'-O-methyl-adenosine
  modified_base 24: mod_base = gm
  modified_base 25: mod_base = cm
  modified_base 26: mod_base = cm
  modified_base 27: mod_base = gm
  modified_base 28: mod_base = OTHER; note = 2'-O-methyl-adenosine
  modified_base 29: mod_base = OTHER; note = 2'-O-methyl-adenosine
  modified_base 30: mod_base = OTHER; note = 2'-O-methyl-adenosine
  modified_base 31: mod_base = gm
  modified_base 32: mod_base = gm
  modified_base 33: mod_base = cm
  modified_base 34: mod_base = um
  modified_base 35: mod_base = gm
  modified_base 36: mod_base = cm
  source 1..36: mol_type = other RNA

SEQ ID NO: 845 - RNA, 36 nt, synthetic construct; identical to SEQ ID NO: 580
  misc_feature 1^2: note = linked via phosphorothioate
  modified_base 1: mod_base = cm
  modified_base 2: mod_base = OTHER; note = 2'-O-methyl-adenosine
  modified_base 3: mod_base = OTHER; note = 2'-O-methyl-adenosine
  modified_base 4: mod_base = um
  modified_base 5: mod_base = um
  modified_base 6: mod_base = OTHER; note = 2'-O-methyl-adenosine
  modified_base 7: mod_base = um
  modified_base 8: mod_base = OTHER; note = 2'-Fluoro-guanosine
  modified_base 9: mod_base = OTHER; note = 2'-Fluoro-uridine
  modified_base 10: mod_base = OTHER; note = 2'-Fluoro-uridine
  modified_base 11: mod_base = OTHER; note = 2'-Fluoro-uridine
  modified_base 12: mod_base = gm
  modified_base 13: mod_base = OTHER; note = hexadecanamidodiethoxymethanol-adenosine
  modified_base 14: mod_base = OTHER; note = 2'-O-methyl-adenosine
  modified_base 15: mod_base = OTHER; note = 2'-O-methyl-adenosine
  modified_base 16: mod_base = gm
  modified_base 17: mod_base = cm
  modified_base 18: mod_base = cm
  modified_base 19: mod_base = OTHER; note = 2'-O-methyl-adenosine
  modified_base 20: mod_base = OTHER; note = 2'-O-methyl-adenosine
  modified_base 21: mod_base = gm
  modified_base 22: mod_base = cm
  modified_base 23: mod_base = OTHER; note = 2'-O-methyl-adenosine
  modified_base 24: mod_base = gm
  modified_base 25: mod_base = cm
  modified_base 26: mod_base = cm
  modified_base 27: mod_base = gm
  modified_base 28: mod_base = OTHER; note = 2'-O-methyl-adenosine
  modified_base 29: mod_base = OTHER; note = 2'-O-methyl-adenosine
  modified_base 30: mod_base = OTHER; note = 2'-O-methyl-adenosine
  modified_base 31: mod_base = gm
  modified_base 32: mod_base = gm
  modified_base 33: mod_base = cm
  modified_base 34: mod_base = um
  modified_base 35: mod_base = gm
  modified_base 36: mod_base = cm
  source 1..36: mol_type = other RNA

SEQ ID NO: 846 - RNA, 36 nt, synthetic construct; identical to SEQ ID NO: 580
  misc_feature 1^2: note = linked via phosphorothioate
  modified_base 1: mod_base = cm
  modified_base 2: mod_base = OTHER; note = 2'-O-methyl-adenosine
  modified_base 3: mod_base = OTHER; note = 2'-O-methyl-adenosine
  modified_base 4: mod_base = um
  modified_base 5: mod_base = um
  modified_base 6: mod_base = OTHER; note = 2'-O-methyl-adenosine
  modified_base 7: mod_base = um
  modified_base 8: mod_base = OTHER; note = 2'-Fluoro-guanosine
  modified_base 9: mod_base = OTHER; note = 2'-Fluoro-uridine
  modified_base 10: mod_base = OTHER; note = 2'-Fluoro-uridine
  modified_base 11: mod_base = OTHER; note = 2'-Fluoro-uridine
  modified_base 12: mod_base = gm
  modified_base 13: mod_base = OTHER; note = 2'-O-methyl-adenosine
  modified_base 14: mod_base = OTHER; note = hexadecanamidodiethoxymethanol-adenosine
  modified_base 15: mod_base = OTHER; note = 2'-O-methyl-adenosine
  modified_base 16: mod_base = gm
  modified_base 17: mod_base = cm
  modified_base 18: mod_base = cm
  modified_base 19: mod_base = OTHER; note = 2'-O-methyl-adenosine
  modified_base 20: mod_base = OTHER; note = 2'-O-methyl-adenosine
  modified_base 21: mod_base = gm
  modified_base 22: mod_base = cm
  modified_base 23: mod_base = OTHER; note = 2'-O-methyl-adenosine
  modified_base 24: mod_base = gm
  modified_base 25: mod_base = cm
  modified_base 26: mod_base = cm
  modified_base 27: mod_base = gm
  modified_base 28: mod_base = OTHER; note = 2'-O-methyl-adenosine
  modified_base 29: mod_base = OTHER; note = 2'-O-methyl-adenosine
  modified_base 30: mod_base = OTHER; note = 2'-O-methyl-adenosine
  modified_base 31: mod_base = gm
  modified_base 32: mod_base = gm
  modified_base 33: mod_base = cm
  modified_base 34: mod_base = um
  modified_base 35: mod_base = gm
  modified_base 36: mod_base = cm
  source 1..36: mol_type = other RNA

SEQ ID NO: 847 - RNA, 36 nt, synthetic construct; identical to SEQ ID NO: 580
  misc_feature 1^2: note = linked via phosphorothioate
  modified_base 1: mod_base = cm
  modified_base 2: mod_base = OTHER; note = 2'-O-methyl-adenosine
  modified_base 3: mod_base = OTHER; note = 2'-O-methyl-adenosine
  modified_base 4: mod_base = um
  modified_base 5: mod_base = um
  modified_base 6: mod_base = OTHER; note = 2'-O-methyl-adenosine
  modified_base 7: mod_base = um
  modified_base 8: mod_base = OTHER; note = 2'-Fluoro-guanosine
  modified_base 9: mod_base = OTHER; note = 2'-Fluoro-uridine
  modified_base 10: mod_base = OTHER; note = 2'-Fluoro-uridine
  modified_base 11: mod_base = OTHER; note = 2'-Fluoro-uridine
  modified_base 12: mod_base = gm
  modified_base 13: mod_base = OTHER; note = 2'-O-methyl-adenosine
  modified_base 14: mod_base = OTHER; note = 2'-O-methyl-adenosine
  modified_base 15: mod_base = OTHER; note = hexadecanamidodiethoxymethanol-adenosine
  modified_base 16: mod_base = gm
  modified_base 17: mod_base = cm
  modified_base 18: mod_base = cm
  modified_base 19: mod_base = OTHER; note = 2'-O-methyl-adenosine
  modified_base 20: mod_base = OTHER; note = 2'-O-methyl-adenosine
  modified_base 21: mod_base = gm
  modified_base 22: mod_base = cm
  modified_base 23: mod_base = OTHER; note = 2'-O-methyl-adenosine
  modified_base 24: mod_base = gm
  modified_base 25: mod_base = cm
  modified_base 26: mod_base = cm
  modified_base 27: mod_base = gm
  modified_base 28: mod_base = OTHER; note = 2'-O-methyl-adenosine
  modified_base 29: mod_base = OTHER; note = 2'-O-methyl-adenosine
  modified_base 30: mod_base = OTHER; note = 2'-O-methyl-adenosine
  modified_base 31: mod_base = gm
  modified_base 32: mod_base = gm
  modified_base 33: mod_base = cm
  modified_base 34: mod_base = um
  modified_base 35: mod_base = gm
  modified_base 36: mod_base = cm
  source 1..36: mol_type = other RNA

SEQ ID NO: 848 - RNA, 36 nt, synthetic construct; identical to SEQ ID NO: 580
  misc_feature 1^2: note = linked via phosphorothioate
  modified_base 1: mod_base = cm
  modified_base 2: mod_base = OTHER; note = 2'-O-methyl-adenosine
  modified_base 3: mod_base = OTHER; note = 2'-O-methyl-adenosine
  modified_base 4: mod_base = um
  modified_base 5: mod_base = um
  modified_base 6: mod_base = OTHER; note = 2'-O-methyl-adenosine
  modified_base 7: mod_base = um
  modified_base 8: mod_base = OTHER; note = 2'-Fluoro-guanosine
  modified_base 9: mod_base = OTHER; note = 2'-Fluoro-uridine
  modified_base 10: mod_base = OTHER; note = 2'-Fluoro-uridine
  modified_base 11: mod_base = OTHER; note = 2'-Fluoro-uridine
  modified_base 12: mod_base = gm
  modified_base 13: mod_base = OTHER; note = 2'-O-methyl-adenosine
  modified_base 14: mod_base = OTHER; note = 2'-O-methyl-adenosine
  modified_base 15: mod_base = OTHER; note = 2'-O-methyl-adenosine
  modified_base 16: mod_base = gm
  modified_base 17: mod_base = cm
  modified_base 18: mod_base = cm
  modified_base 19: mod_base = OTHER; note = hexadecanamidodiethoxymethanol-adenosine
  modified_base 20: mod_base = OTHER; note = 2'-O-methyl-adenosine
  modified_base 21: mod_base = gm
  modified_base 22: mod_base = cm
  modified_base 23: mod_base = OTHER; note = 2'-O-methyl-adenosine
  modified_base 24: mod_base = gm
  modified_base 25: mod_base = cm
  modified_base 26: mod_base = cm
  modified_base 27: mod_base = gm
  modified_base 28: mod_base = OTHER; note = 2'-O-methyl-adenosine
  modified_base 29: mod_base = OTHER; note = 2'-O-methyl-adenosine
  modified_base 30: mod_base = OTHER; note = 2'-O-methyl-adenosine
  modified_base 31: mod_base = gm
  modified_base 32: mod_base = gm
  modified_base 33: mod_base = cm
  modified_base 34: mod_base = um
  modified_base 35: mod_base = gm
  modified_base 36: mod_base = cm
  source 1..36: mol_type = other RNA

SEQ ID NO: 849 - RNA, 36 nt, synthetic construct; identical to SEQ ID NO: 580
  misc_feature 1^2: note = linked via phosphorothioate
  modified_base 1: mod_base = cm
  modified_base 2: mod_base = OTHER; note = 2'-O-methyl-adenosine
  modified_base 3: mod_base = OTHER; note = 2'-O-methyl-adenosine
  modified_base 4: mod_base = um
  modified_base 5: mod_base = um
  modified_base 6: mod_base = OTHER; note = 2'-O-methyl-adenosine
  modified_base 7: mod_base = um
  modified_base 8: mod_base = OTHER; note = 2'-Fluoro-guanosine
  modified_base 9: mod_base = OTHER; note = 2'-Fluoro-uridine
  modified_base 10: mod_base = OTHER; note = 2'-Fluoro-uridine
  modified_base 11: mod_base = OTHER; note = 2'-Fluoro-uridine
  modified_base 12: mod_base = gm
  modified_base 13: mod_base = OTHER; note = 2'-O-methyl-adenosine
  modified_base 14: mod_base = OTHER; note = 2'-O-methyl-adenosine
  modified_base 15: mod_base = OTHER; note = 2'-O-methyl-adenosine
  modified_base 16: mod_base = gm
  modified_base 17: mod_base = cm
  modified_base 18: mod_base = cm
  modified_base 19: mod_base = OTHER; note = 2'-O-methyl-adenosine
  modified_base 20: mod_base = OTHER; note = hexadecanamidodiethoxymethanol-adenosine
  modified_base 21: mod_base = gm
  modified_base 22: mod_base = cm
  modified_base 23: mod_base = OTHER; note = 2'-O-methyl-adenosine
  modified_base 24: mod_base = gm
  modified_base 25: mod_base = cm
  modified_base 26: mod_base = cm
  modified_base 27: mod_base = gm
  modified_base 28: mod_base = OTHER; note = 2'-O-methyl-adenosine
  modified_base 29: mod_base = OTHER; note = 2'-O-methyl-adenosine
  modified_base 30: mod_base = OTHER; note = 2'-O-methyl-adenosine
  modified_base 31: mod_base = gm
  modified_base 32: mod_base = gm
  modified_base 33: mod_base = cm
  modified_base 34: mod_base = um
  modified_base 35: mod_base = gm
  modified_base 36: mod_base = cm
  source 1..36: mol_type = other RNA

SEQ ID NO: 850 - RNA, 36 nt, synthetic construct; identical to SEQ ID NO: 580
  misc_feature 1^2: note = linked via phosphorothioate
  modified_base 1: mod_base = cm
  modified_base 2: mod_base = OTHER; note = 2'-O-methyl-adenosine
  modified_base 3: mod_base = OTHER; note = 2'-O-methyl-adenosine
  modified_base 4: mod_base = um
  modified_base 5: mod_base = um
  modified_base 6: mod_base = OTHER; note = 2'-O-methyl-adenosine
  modified_base 7: mod_base = um
  modified_base 8: mod_base = OTHER; note = 2'-Fluoro-guanosine
  modified_base 9: mod_base = OTHER; note = 2'-Fluoro-uridine
  modified_base 10: mod_base = OTHER; note = 2'-Fluoro-uridine
  modified_base 11: mod_base = OTHER; note = 2'-Fluoro-uridine
  modified_base 12: mod_base = gm
  modified_base 13: mod_base = OTHER; note = 2'-O-methyl-adenosine
  modified_base 14: mod_base = OTHER; note = 2'-O-methyl-adenosine
  modified_base 15: mod_base = OTHER; note = 2'-O-methyl-adenosine
  modified_base 16: mod_base = gm
  modified_base 17: mod_base = cm
  modified_base 18: mod_base = cm
  modified_base 19: mod_base = OTHER; note = 2'-O-methyl-adenosine
  modified_base 20: mod_base = OTHER; note = 2'-O-methyl-adenosine
  modified_base 21: mod_base = gm
  modified_base 22: mod_base = cm
  modified_base 23: mod_base = OTHER; note = hexadecanamidodiethoxymethanol-adenosine
  modified_base 24: mod_base = gm
  modified_base 25: mod_base = cm
  modified_base 26: mod_base = cm
  modified_base 27: mod_base = gm
  modified_base 28: mod_base = OTHER; note = 2'-O-methyl-adenosine
  modified_base 29: mod_base = OTHER; note = 2'-O-methyl-adenosine
  modified_base 30: mod_base = OTHER; note = 2'-O-methyl-adenosine
  modified_base 31: mod_base = gm
  modified_base 32: mod_base = gm
  modified_base 33: mod_base = cm
  modified_base 34: mod_base = um
  modified_base 35: mod_base = gm
  modified_base 36: mod_base = cm
  source 1..36: mol_type = other RNA

SEQ ID NO: 851 - RNA, 36 nt, synthetic construct; identical to SEQ ID NO: 580
  misc_feature 1^2: note = linked via phosphorothioate
  modified_base 1: mod_base = cm
  modified_base 2: mod_base = OTHER; note = 2'-O-methyl-adenosine
  modified_base 3: mod_base = OTHER; note = 2'-O-methyl-adenosine
  modified_base 4: mod_base = um
  modified_base 5: mod_base = um
  modified_base 6: mod_base = OTHER; note = 2'-O-methyl-adenosine
  modified_base 7: mod_base = um
  modified_base 8: mod_base = OTHER; note = 2'-Fluoro-guanosine
  modified_base 9: mod_base = OTHER; note = 2'-Fluoro-uridine
  modified_base 10: mod_base = OTHER; note = 2'-Fluoro-uridine
  modified_base 11: mod_base = OTHER; note = 2'-Fluoro-uridine
  modified_base 12: mod_base = gm
  modified_base 13: mod_base = OTHER; note = 2'-O-methyl-adenosine
  modified_base 14: mod_base = OTHER; note = 2'-O-methyl-adenosine
  modified_base 15: mod_base = OTHER; note = 2'-O-methyl-adenosine
  modified_base 16: mod_base = gm
  modified_base 17: mod_base = cm
  modified_base 18: mod_base = cm
  modified_base 19: mod_base = OTHER; note = 2'-O-methyl-adenosine
  modified_base 20: mod_base = OTHER; note = 2'-O-methyl-adenosine
  modified_base 21: mod_base = gm
  modified_base 22: mod_base = cm
  modified_base 23: mod_base = OTHER; note = 2'-O-methyl-adenosine
  modified_base 24: mod_base = gm
  modified_base 25: mod_base = cm
  modified_base 26: mod_base = cm
  modified_base 27: mod_base = gm
  modified_base 28: mod_base = OTHER; note = hexadecanamidodiethoxymethanol-adenosine
  modified_base 29: mod_base = OTHER; note = 2'-O-methyl-adenosine
  modified_base 30: mod_base = OTHER; note = 2'-O-methyl-adenosine
  modified_base 31: mod_base = gm
  modified_base 32: mod_base = gm
  modified_base 33: mod_base = cm
  modified_base 34: mod_base = um
  modified_base 35: mod_base = gm
  modified_base 36: mod_base = cm
  source 1..36: mol_type = other RNA

SEQ ID NO: 852 - RNA, 36 nt, synthetic construct; identical to SEQ ID NO: 580
  misc_feature 1^2: note = linked via phosphorothioate
  modified_base 1: mod_base = cm
  modified_base 2: mod_base = OTHER; note = 2'-O-methyl-adenosine
  modified_base 3: mod_base = OTHER; note = 2'-O-methyl-adenosine
  modified_base 4: mod_base = um
  modified_base 5: mod_base = um
  modified_base 6: mod_base = OTHER; note = 2'-O-methyl-adenosine
  modified_base 7: mod_base = um
  modified_base 8: mod_base = OTHER; note = 2'-Fluoro-guanosine
  modified_base 9: mod_base = OTHER; note = 2'-Fluoro-uridine
  modified_base 10: mod_base = OTHER; note = 2'-Fluoro-uridine
  modified_base 11: mod_base = OTHER; note = 2'-Fluoro-uridine
  modified_base 12: mod_base = gm
  modified_base 13: mod_base = OTHER; note = 2'-O-methyl-adenosine
  modified_base 14: mod_base = OTHER; note = 2'-O-methyl-adenosine
  modified_base 15: mod_base = OTHER; note = 2'-O-methyl-adenosine
  modified_base 16: mod_base = gm
  modified_base 17: mod_base = cm
  modified_base 18: mod_base = cm
  modified_base 19: mod_base = OTHER; note = 2'-O-methyl-adenosine
  modified_base 20: mod_base = OTHER; note = 2'-O-methyl-adenosine
  modified_base 21: mod_base = gm
  modified_base 22: mod_base = cm
  modified_base 23: mod_base = OTHER; note = 2'-O-methyl-adenosine
  modified_base 24: mod_base = gm
  modified_base 25: mod_base = cm
  modified_base 26: mod_base = cm
  modified_base 27: mod_base = gm
  modified_base 28: mod_base = OTHER; note = 2'-O-methyl-adenosine
  modified_base 29: mod_base = OTHER; note = hexadecanamidodiethoxymethanol-adenosine
  modified_base 30: mod_base = OTHER; note = 2'-O-methyl-adenosine
  modified_base 31: mod_base = gm
  modified_base 32: mod_base = gm
  modified_base 33: mod_base = cm
  modified_base 34: mod_base = um
  modified_base 35: mod_base = gm
  modified_base 36: mod_base = cm
  source 1..36: mol_type = other RNA

SEQ ID NO: 853 - RNA, 36 nt, synthetic construct; identical to SEQ ID NO: 580
  misc_feature 1^2: note = linked via phosphorothioate
  modified_base 1: mod_base = cm
  modified_base 2: mod_base = OTHER; note = 2'-O-methyl-adenosine
  modified_base 3: mod_base = OTHER; note = 2'-O-methyl-adenosine
  modified_base 4: mod_base = um
  modified_base 5: mod_base = um
  modified_base 6: mod_base = OTHER; note = 2'-O-methyl-adenosine
  modified_base 7: mod_base = um
  modified_base 8: mod_base = OTHER; note = 2'-Fluoro-guanosine
  modified_base 9: mod_base = OTHER; note = 2'-Fluoro-uridine
  modified_base 10: mod_base = OTHER; note = 2'-Fluoro-uridine
  modified_base 11: mod_base = OTHER; note = 2'-Fluoro-uridine
  modified_base 12: mod_base = gm
  modified_base 13: mod_base = OTHER; note = 2'-O-methyl-adenosine
  modified_base 14: mod_base = OTHER; note = 2'-O-methyl-adenosine
  modified_base 15: mod_base = OTHER; note = 2'-O-methyl-adenosine
  modified_base 16: mod_base = gm
  modified_base 17: mod_base = cm
  modified_base 18: mod_base = cm
  modified_base 19: mod_base = OTHER; note = 2'-O-methyl-adenosine
  modified_base 20: mod_base = OTHER; note = 2'-O-methyl-adenosine
  modified_base 21: mod_base = gm
  modified_base 22: mod_base = cm
  modified_base 23: mod_base = OTHER; note = 2'-O-methyl-adenosine
  modified_base 24: mod_base = gm
  modified_base 25: mod_base = cm
  modified_base 26: mod_base = cm
  modified_base 27: mod_base = gm
  modified_base 28: mod_base = OTHER; note = 2'-O-methyl-adenosine
  modified_base 29: mod_base = OTHER; note = 2'-O-methyl-adenosine
  modified_base 30: mod_base = OTHER; note = hexadecanamidodiethoxymethanol-adenosine
  modified_base 31: mod_base = gm
  modified_base 32: mod_base = gm
  modified_base 33: mod_base = cm
  modified_base 34: mod_base = um
  modified_base 35: mod_base = gm
  modified_base 36: mod_base = cm
  source 1..36: mol_type = other RNA

SEQ ID NO: 854 - RNA, 36 nt, synthetic construct; identical to SEQ ID NO: 580
  misc_feature 1^2: note = linked via phosphorothioate
  modified_base 1: mod_base = OTHER; note = hexadecanamidodiethoxymethanol-cytidine
  modified_base 2: mod_base = OTHER; note = 2'-O-methyl-adenosine
  modified_base 3: mod_base = OTHER; note = 2'-O-methyl-adenosine
  modified_base 4: mod_base = um
  modified_base 5: mod_base = um
  modified_base 6: mod_base = OTHER; note = 2'-O-methyl-adenosine
  modified_base 7: mod_base = um
  modified_base 8: mod_base = OTHER; note = 2'-Fluoro-guanosine
  modified_base 9: mod_base = OTHER; note = 2'-Fluoro-uridine
  modified_base 10: mod_base = OTHER; note = 2'-Fluoro-uridine
  modified_base 11: mod_base = OTHER; note = 2'-Fluoro-uridine
  modified_base 12: mod_base = gm
  modified_base 13: mod_base = OTHER; note = 2'-O-methyl-adenosine
  modified_base 14: mod_base = OTHER; note = 2'-O-methyl-adenosine
  modified_base 15: mod_base = OTHER; note = 2'-O-methyl-adenosine
  modified_base 16: mod_base = gm
  modified_base 17: mod_base = cm
  modified_base 18: mod_base = cm
  modified_base 19: mod_base = OTHER; note = 2'-O-methyl-adenosine
  modified_base 20: mod_base = OTHER; note = 2'-O-methyl-adenosine
  modified_base 21: mod_base = gm
  modified_base 22: mod_base = cm
  modified_base 23: mod_base = OTHER; note = 2'-O-methyl-adenosine
  modified_base 24: mod_base = gm
  modified_base 25: mod_base = cm
  modified_base 26: mod_base = cm
  modified_base 27: mod_base = gm
  modified_base 28: mod_base = OTHER; note = 2'-O-methyl-adenosine
  modified_base 29: mod_base = OTHER; note = 2'-O-methyl-adenosine
  modified_base 30: mod_base = OTHER; note = 2'-O-methyl-adenosine
  modified_base 31: mod_base = gm
  modified_base 32: mod_base = gm
  modified_base 33: mod_base = cm
  modified_base 34: mod_base = um
  modified_base 35: mod_base = gm
  modified_base 36: mod_base = cm
  source 1..36: mol_type = other RNA

SEQ ID NO: 855 - RNA, 36 nt, synthetic construct
  misc_feature 1^2: note = linked via phosphorothioate
  modified_base 1: mod_base = OTHER; note = hexadecanamidodiethoxymethanol-adenosine
  modified_base 2: mod_base = OTHER; note = 2'-O-methyl-adenosine
  modified_base 3: mod_base = OTHER; note = 2'-O-methyl-adenosine
  modified_base 4: mod_base = um
  modified_base 5: mod_base = um
  modified_base 6: mod_base = OTHER; note = 2'-O-methyl-adenosine
  modified_base 7: mod_base = um
  modified_base 8: mod_base = OTHER; note = 2'-Fluoro-guanosine
  modified_base 9: mod_base = OTHER; note = 2'-Fluoro-uridine
  modified_base 10: mod_base = OTHER; note = 2'-Fluoro-uridine
  modified_base 11: mod_base = OTHER; note = 2'-Fluoro-uridine
  modified_base 12: mod_base = gm
  modified_base 13: mod_base = OTHER; note = 2'-O-methyl-adenosine
  modified_base 14: mod_base = OTHER; note = 2'-O-methyl-adenosine
  modified_base 15: mod_base = OTHER; note = 2'-O-methyl-adenosine
  modified_base 16: mod_base = gm
  modified_base 17: mod_base = cm
  modified_base 18: mod_base = cm
  modified_base 19: mod_base = OTHER; note = 2'-O-methyl-adenosine
  modified_base 20: mod_base = OTHER; note = 2'-O-methyl-adenosine
  modified_base 21: mod_base = gm
  modified_base 22: mod_base = cm
  modified_base 23: mod_base = OTHER; note = 2'-O-methyl-adenosine
  modified_base 24: mod_base = gm
  modified_base 25: mod_base = cm
  modified_base 26: mod_base = cm
  modified_base 27: mod_base = gm
  modified_base 28: mod_base = OTHER; note = 2'-O-methyl-adenosine
  modified_base 29: mod_base = OTHER; note = 2'-O-methyl-adenosine
  modified_base 30: mod_base = OTHER; note = 2'-O-methyl-adenosine
  modified_base 31: mod_base = gm
  modified_base 32: mod_base = gm
  modified_base 33: mod_base = cm
  modified_base 34: mod_base = um
  modified_base 35: mod_base = gm
  modified_base 36: mod_base = cm
  source 1..36: mol_type = other RNA
aaattatgtttgaaagccaagcagccgaaaggctgc

SEQ ID NO: 856 - RNA, 20 nt, synthetic construct
  source 1..20: mol_type = other RNA
caattatgtttgaaagccaa

SEQ ID NO: 857 - RNA, 20 nt, synthetic construct
  misc_feature 1^2: note = linked via phosphorothioate
  modified_base 1: mod_base = cm
  modified_base 2: mod_base = OTHER; note = 2'-O-methyl-adenosine
  modified_base 3: mod_base = OTHER; note = 2'-O-methyl-adenosine
  modified_base 4: mod_base = um
  modified_base 5: mod_base = um
  modified_base 6: mod_base = OTHER; note = 2'-O-methyl-adenosine
  modified_base 7: mod_base = um
  modified_base 8: mod_base = OTHER; note = 2'-Fluoro-guanosine
  modified_base 9: mod_base = OTHER; note = 2'-Fluoro-uridine
  modified_base 10: mod_base = OTHER; note = 2'-Fluoro-uridine
  modified_base 11: mod_base = OTHER; note = 2'-Fluoro-uridine
  modified_base 12: mod_base = gm
  modified_base 13: mod_base = OTHER; note = 2'-O-methyl-adenosine
  modified_base 14: mod_base = OTHER; note = 2'-O-methyl-adenosine
  modified_base 15: mod_base = OTHER; note = 2'-O-methyl-adenosine
  modified_base 16: mod_base = gm
  modified_base 17: mod_base = cm
  misc_feature 18..20: note = linked via phosphorothioate
  modified_base 18: mod_base = cm
  modified_base 19: mod_base = OTHER; note = 2'-O-methyl-adenosine
  modified_base 20: mod_base = OTHER; note = 2'-O-methyl-adenosine
  source 1..20: mol_type = other RNA
caattatgtttgaaagccaa

SEQ ID NO: 858 - RNA, 20 nt, synthetic construct
  misc_feature 1^2: note = linked via phosphorothioate
  modified_base 1: mod_base = cm
  modified_base 2: mod_base = OTHER; note = hexadecanamidodiethoxymethanol-adenosine
  modified_base 3: mod_base = OTHER; note = 2'-O-methyl-adenosine
  modified_base 4: mod_base = um
  modified_base 5: mod_base = um
  modified_base 6: mod_base = OTHER; note = 2'-O-methyl-adenosine
  modified_base 7: mod_base = um
  modified_base 8: mod_base = OTHER; note = 2'-Fluoro-guanosine
  modified_base 9: mod_base = OTHER; note = 2'-Fluoro-uridine
  modified_base 10: mod_base = OTHER; note = 2'-Fluoro-uridine
  modified_base 11: mod_base = OTHER; note = 2'-Fluoro-uridine
  modified_base 12: mod_base = gm
  modified_base 13: mod_base = OTHER; note = 2'-O-methyl-adenosine
  modified_base 14: mod_base = OTHER; note = 2'-O-methyl-adenosine
  modified_base 15: mod_base = OTHER; note = 2'-O-methyl-adenosine
  modified_base 16: mod_base = gm
  modified_base 17: mod_base = cm
  misc_feature 18..20: note = linked via phosphorothioate
  modified_base 18: mod_base = cm
  modified_base 19: mod_base = OTHER; note = 2'-O-methyl-adenosine
  modified_base 20: mod_base = OTHER; note = 2'-O-methyl-adenosine
  source 1..20: mol_type = other RNA
caattatgtttgaaagccaa

SEQ ID NO: 859 - RNA, 20 nt, synthetic construct
  misc_feature 1^2: note = linked via phosphorothioate
  modified_base 1: mod_base = cm
  modified_base 2: mod_base = OTHER; note = 2'-O-methyl-adenosine
  modified_base 3: mod_base = OTHER; note = hexadecanamidodiethoxymethanol-adenosine
  modified_base 4: mod_base = um
  modified_base 5: mod_base = um
  modified_base 6: mod_base = OTHER; note = 2'-O-methyl-adenosine
  modified_base 7: mod_base = um
  modified_base 8: mod_base = OTHER; note = 2'-Fluoro-guanosine
  modified_base 9: mod_base = OTHER; note = 2'-Fluoro-uridine
  modified_base 10: mod_base = OTHER; note = 2'-Fluoro-uridine
  modified_base 11: mod_base = OTHER; note = 2'-Fluoro-uridine
  modified_base 12: mod_base = gm
  modified_base 13: mod_base = OTHER; note = 2'-O-methyl-adenosine
  modified_base 14: mod_base = OTHER; note = 2'-O-methyl-adenosine
  modified_base 15: mod_base = OTHER; note = 2'-O-methyl-adenosine
  modified_base 16: mod_base = gm
  modified_base 17: mod_base = cm
  misc_feature 18..20: note = linked via phosphorothioate
  modified_base 18: mod_base = cm
  modified_base 19: mod_base = OTHER; note = 2'-O-methyl-adenosine
  modified_base 20: mod_base = OTHER; note = 2'-O-methyl-adenosine
  source 1..20: mol_type = other RNA
caattatgtttgaaagccaa

SEQ ID NO: 860 - RNA, 20 nt, synthetic construct
  misc_feature 1^2: note = linked via phosphorothioate
  modified_base 1: mod_base = cm
  modified_base 2: mod_base = OTHER; note = 2'-O-methyl-adenosine
  modified_base 3: mod_base = OTHER; note = 2'-O-methyl-adenosine
  modified_base 4: mod_base = um
  modified_base 5: mod_base = um
  modified_base 6: mod_base = OTHER; note = hexadecanamidodiethoxymethanol-adenosine
  modified_base 7: mod_base = um
  modified_base 8: mod_base = OTHER; note = 2'-Fluoro-guanosine
  modified_base 9: mod_base = OTHER; note = 2'-Fluoro-uridine
  modified_base 10: mod_base = OTHER; note = 2'-Fluoro-uridine
  modified_base 11: mod_base = OTHER; note = 2'-Fluoro-uridine
  modified_base 12: mod_base = gm
  modified_base 13: mod_base = OTHER; note = 2'-O-methyl-adenosine
  modified_base 14: mod_base = OTHER; note = 2'-O-methyl-adenosine
  modified_base 15: mod_base = OTHER; note = 2'-O-methyl-adenosine
  modified_base 16: mod_base = gm
  modified_base 17: mod_base = cm
  misc_feature 18..20: note = linked via phosphorothioate
  modified_base 18: mod_base = cm
  modified_base 19: mod_base = OTHER; note = 2'-O-methyl-adenosine
  modified_base 20: mod_base = OTHER; note = 2'-O-methyl-adenosine
  source 1..20: mol_type = other RNA
caattatgtttgaaagccaa

SEQ ID NO: 861 - RNA, 20 nt, synthetic construct
  misc_feature 1^2: note = linked via phosphorothioate
  modified_base 1: mod_base = cm
  modified_base 2: mod_base = OTHER; note = 2'-O-methyl-adenosine
  modified_base 3: mod_base = OTHER; note = 2'-O-methyl-adenosine
  modified_base 4: mod_base = um
  modified_base 5: mod_base = um
  modified_base 6: mod_base = OTHER; note = 2'-O-methyl-adenosine
  modified_base 7: mod_base = um
  modified_base 8: mod_base = OTHER; note = 2'-Fluoro-guanosine
  modified_base 9: mod_base = OTHER; note = 2'-Fluoro-uridine
  modified_base 10: mod_base = OTHER; note = 2'-Fluoro-uridine
  modified_base 11: mod_base = OTHER; note = 2'-Fluoro-uridine
  modified_base 12: mod_base = gm
  modified_base 13: mod_base = OTHER; note = hexadecanamidodiethoxymethanol-adenosine
  modified_base 14: mod_base = OTHER; note = 2'-O-methyl-adenosine
  modified_base 15: mod_base = OTHER; note = 2'-O-methyl-adenosine
  modified_base 16: mod_base = gm
  modified_base 17: mod_base = cm
  misc_feature 18..20: note = linked via phosphorothioate
  modified_base 18: mod_base = cm
  modified_base 19: mod_base = OTHER; note = 2'-O-methyl-adenosine
  modified_base 20: mod_base = OTHER; note = 2'-O-methyl-adenosine
  source 1..20: mol_type = other RNA
caattatgtttgaaagccaa

SEQ ID NO: 862 - RNA, 20 nt, synthetic construct
  misc_feature 1^2: note = linked via phosphorothioate
  modified_base 1: mod_base = cm
  modified_base 2: mod_base = OTHER; note = 2'-O-methyl-adenosine
  modified_base 3: mod_base = OTHER; note = 2'-O-methyl-adenosine
  modified_base 4: mod_base = um
  modified_base 5: mod_base = um
  modified_base 6: mod_base = OTHER; note = 2'-O-methyl-adenosine
  modified_base 7: mod_base = um
  modified_base 8: mod_base = OTHER; note = 2'-Fluoro-guanosine
  modified_base 9: mod_base = OTHER; note = 2'-Fluoro-uridine
  modified_base 10: mod_base = OTHER; note = 2'-Fluoro-uridine
  modified_base 11: mod_base = OTHER; note = 2'-Fluoro-uridine
  modified_base 12: mod_base = gm
  modified_base 13: mod_base = OTHER; note = 2'-O-methyl-adenosine
  modified_base 14: mod_base = OTHER; note = hexadecanamidodiethoxymethanol-adenosine
  modified_base 15: mod_base = OTHER; note = 2'-O-methyl-adenosine
  modified_base 16: mod_base = gm
  modified_base 17: mod_base = cm
  misc_feature 18..20: note = linked via phosphorothioate
  modified_base 18: mod_base = cm
  modified_base 19: mod_base = OTHER; note = 2'-O-methyl-adenosine
  modified_base 20: mod_base = OTHER; note = 2'-O-methyl-adenosine
  source 1..20: mol_type = other RNA
caattatgtttgaaagccaa

SEQ ID NO: 863 - RNA, 20 nt, synthetic construct
  misc_feature 1^2: note = linked via phosphorothioate
  modified_base 1: mod_base = cm
  modified_base 2: mod_base = OTHER; note = 2'-O-methyl-adenosine
  modified_base 3: mod_base = OTHER; note = 2'-O-methyl-adenosine
  modified_base 4: mod_base = um
  modified_base 5: mod_base = um
  modified_base 6: mod_base = OTHER; note = 2'-O-methyl-adenosine
  modified_base 7: mod_base = um
  modified_base 8: mod_base = OTHER; note = 2'-Fluoro-guanosine
  modified_base 9: mod_base = OTHER; note = 2'-Fluoro-uridine
  modified_base 10: mod_base = OTHER; note = 2'-Fluoro-uridine
  modified_base 11: mod_base = OTHER; note = 2'-Fluoro-uridine
  modified_base 12: mod_base = gm
  modified_base 13: mod_base = OTHER; note = 2'-O-methyl-adenosine
  modified_base 14: mod_base = OTHER; note = 2'-O-methyl-adenosine
  modified_base 15: mod_base = OTHER; note = hexadecanamidodiethoxymethanol-adenosine
  modified_base 16: mod_base = gm
  modified_base 17: mod_base = cm
  misc_feature 18..20: note = linked via phosphorothioate
  modified_base 18: mod_base = cm
  modified_base 19: mod_base = OTHER; note = 2'-O-methyl-adenosine
  modified_base 20: mod_base = OTHER; note = 2'-O-methyl-adenosine
  source 1..20: mol_type = other RNA
caattatgtttgaaagccaa

SEQ ID NO: 864 - RNA, 20 nt, synthetic construct
  misc_feature 1^2: note = linked via phosphorothioate
  modified_base 1: mod_base = cm
  modified_base 2: mod_base = OTHER; note = 2'-O-methyl-adenosine
  modified_base 3: mod_base = OTHER; note = 2'-O-methyl-adenosine
  modified_base 4: mod_base = um
  modified_base 5: mod_base = um
  modified_base 6: mod_base = OTHER; note = 2'-O-methyl-adenosine
  modified_base 7: mod_base = um
  modified_base 8: mod_base = OTHER; note = 2'-Fluoro-guanosine
  modified_base 9: mod_base = OTHER; note = 2'-Fluoro-uridine
  modified_base 10: mod_base = OTHER; note = 2'-Fluoro-uridine
  modified_base 11: mod_base = OTHER; note = 2'-Fluoro-uridine
  modified_base 12: mod_base = gm
  modified_base 13: mod_base = OTHER; note = 2'-O-methyl-adenosine
  modified_base 14: mod_base = OTHER; note = 2'-O-methyl-adenosine
  modified_base 15: mod_base = OTHER; note = 2'-O-methyl-adenosine
  modified_base 16: mod_base = gm
  modified_base 17: mod_base = cm
  misc_feature 18..20: note = linked via phosphorothioate
  modified_base 18: mod_base = cm
  modified_base 19: mod_base = OTHER; note = hexadecanamidodiethoxymethanol-adenosine
  modified_base 20: mod_base = OTHER; note = 2'-O-methyl-adenosine
  source 1..20: mol_type = other RNA
caattatgtttgaaagccaa

SEQ ID NO: 865 - RNA, 20 nt, synthetic construct
  misc_feature 1^2: note = linked via phosphorothioate
  modified_base 1: mod_base = cm
  modified_base 2: mod_base = OTHER; note = 2'-O-methyl-adenosine
  modified_base 3: mod_base = OTHER; note = 2'-O-methyl-adenosine
  modified_base 4: mod_base = um
  modified_base 5: mod_base = um
  modified_base 6: mod_base = OTHER; note = 2'-O-methyl-adenosine
  modified_base 7: mod_base = um
  modified_base 8: mod_base = OTHER; note = 2'-Fluoro-guanosine
  modified_base 9: mod_base = OTHER; note = 2'-Fluoro-uridine
  modified_base 10: mod_base = OTHER; note = 2'-Fluoro-uridine
  modified_base 11: mod_base = OTHER; note = 2'-Fluoro-uridine
  modified_base 12: mod_base = gm
  modified_base 13: mod_base = OTHER; note = 2'-O-methyl-adenosine
  modified_base 14: mod_base = OTHER; note = 2'-O-methyl-adenosine
  modified_base 15: mod_base = OTHER; note = 2'-O-methyl-adenosine
  modified_base 16: mod_base = gm
  modified_base 17: mod_base = cm
  misc_feature 18..20: note = linked via phosphorothioate
  modified_base 18: mod_base = cm
  modified_base 19: mod_base = OTHER; note = 2'-O-methyl-adenosine
  modified_base 20: mod_base = OTHER; note = hexadecanamidodiethoxymethanol-adenosine
  source 1..20: mol_type = other RNA
caattatgtttgaaagccaa

SEQ ID NO: 866 - RNA, 16 nt, synthetic construct
  source 1..16: mol_type = other RNA
gcagccgaaaggctgc

SEQ ID NO: 867 - RNA, 20 nt, synthetic construct
  misc_feature 1^2: note = linked via phosphorothioate
  modified_base 1: mod_base = OTHER; note = hexadecanamidodiethoxymethanol-cytidine
  modified_base 2: mod_base = OTHER; note = 2'-O-methyl-adenosine
  modified_base 3: mod_base = OTHER; note = 2'-O-methyl-adenosine
  modified_base 4: mod_base = um
  modified_base 5: mod_base = um
  modified_base 6: mod_base = OTHER; note = 2'-O-methyl-adenosine
  modified_base 7: mod_base = um
  modified_base 8: mod_base = OTHER; note = 2'-Fluoro-guanosine
  modified_base 9: mod_base = OTHER; note = 2'-Fluoro-uridine
  modified_base 10: mod_base = OTHER; note = 2'-Fluoro-uridine
  modified_base 11: mod_base = OTHER; note = 2'-Fluoro-uridine
  modified_base 12: mod_base = gm
  modified_base 13: mod_base = OTHER; note = 2'-O-methyl-adenosine
  modified_base 14: mod_base = OTHER; note = 2'-O-methyl-adenosine
  modified_base 15: mod_base = OTHER; note = 2'-O-methyl-adenosine
  modified_base 16: mod_base = gm
  modified_base 17: mod_base = cm
  misc_feature 18..20: note = linked via phosphorothioate
  modified_base 18: mod_base = cm
  modified_base 19: mod_base = OTHER; note = 2'-O-methyl-adenosine
  modified_base 20: mod_base = OTHER; note = 2'-O-methyl-adenosine
  source 1..20: mol_type = other RNA
caattatgtttgaaagccaa

SEQ ID NO: 868 - RNA, 20 nt, synthetic construct
  misc_feature 1^2: note = linked via phosphorothioate
  modified_base 1: mod_base = cm
  modified_base 2: mod_base = OTHER; note = 2'-O-methyl-adenosine
  modified_base 3: mod_base = OTHER; note = 2'-O-methyl-adenosine
  modified_base 4: mod_base = um
  modified_base 5: mod_base = OTHER; note = hexadecanamidodiethoxymethanol-uridine
  modified_base 6: mod_base = OTHER; note = 2'-O-methyl-adenosine
  modified_base 7: mod_base = um
  modified_base 8: mod_base = OTHER; note = 2'-Fluoro-guanosine
  modified_base 9: mod_base = OTHER; note = 2'-Fluoro-uridine
  modified_base 10: mod_base = OTHER; note = 2'-Fluoro-uridine
  modified_base 11: mod_base = OTHER; note = 2'-Fluoro-uridine
  modified_base 12: mod_base = gm
  modified_base 13: mod_base = OTHER; note = 2'-O-methyl-adenosine
  modified_base 14: mod_base = OTHER; note = 2'-O-methyl-adenosine
  modified_base 15: mod_base = OTHER; note = 2'-O-methyl-adenosine
  modified_base 16: mod_base = gm
  modified_base 17: mod_base = cm
  misc_feature 18..20: note = linked via phosphorothioate
  modified_base 18: mod_base = cm
  modified_base 19: mod_base = OTHER; note = 2'-O-methyl-adenosine
  modified_base 20: mod_base = OTHER; note = 2'-O-methyl-adenosine
  source 1..20: mol_type = other RNA
caattatgtttgaaagccaa

SEQ ID NO: 869 - RNA, 20 nt, synthetic construct
  misc_feature 1^2: note = linked via phosphorothioate
  modified_base 1: mod_base = cm
  modified_base 2: mod_base = OTHER; note = 2'-O-methyl-adenosine
  modified_base 3: mod_base = OTHER; note = 2'-O-methyl-adenosine
  modified_base 4: mod_base = um
  modified_base 5: mod_base = um
  modified_base 6: mod_base = OTHER; note = 2'-O-methyl-adenosine
  modified_base 7: mod_base = OTHER; note = hexadecanamidodiethoxymethanol-uridine
  modified_base 8: mod_base = OTHER; note = 2'-Fluoro-guanosine
  modified_base 9: mod_base = OTHER; note = 2'-Fluoro-uridine
  modified_base 10: mod_base = OTHER; note = 2'-Fluoro-uridine
  modified_base 11: mod_base = OTHER; note = 2'-Fluoro-uridine
  modified_base 12: mod_base = gm
  modified_base 13: mod_base = OTHER; note = 2'-O-methyl-adenosine
  modified_base 14: mod_base = OTHER; note = 2'-O-methyl-adenosine
  modified_base 15: mod_base = OTHER; note = 2'-O-methyl-adenosine
  modified_base 16: mod_base = gm
  modified_base 17: mod_base = cm
  misc_feature 18..20: note = linked via phosphorothioate
  modified_base 18: mod_base = cm
  modified_base 19: mod_base = OTHER; note = 2'-O-methyl-adenosine
  modified_base 20: mod_base = OTHER; note = 2'-O-methyl-adenosine
  source 1..20: mol_type = other RNA
caattatgtttgaaagccaa

SEQ ID NO: 870 - RNA, 20 nt, synthetic construct
  misc_feature 1^2: note = linked via phosphorothioate
  modified_base 1: mod_base = cm
  modified_base 2: mod_base = OTHER; note = 2'-O-methyl-adenosine
  modified_base 3: mod_base = OTHER; note = 2'-O-methyl-adenosine
  modified_base 4: mod_base = um
  modified_base 5: mod_base = um
  modified_base 6: mod_base = OTHER; note = 2'-O-methyl-adenosine
  modified_base 7: mod_base = um
  modified_base 8: mod_base = OTHER; note = 2'-Fluoro-guanosine
  modified_base 9: mod_base = OTHER; note = hexadecanamidodiethoxymethanol-uridine
  modified_base 10: mod_base = OTHER; note = 2'-Fluoro-uridine
  modified_base 11: mod_base = OTHER; note = 2'-Fluoro-uridine
  modified_base 12: mod_base = gm
  modified_base 13: mod_base = OTHER; note = 2'-O-methyl-adenosine
  modified_base 14: mod_base = OTHER; note = 2'-O-methyl-adenosine
  modified_base 15: mod_base = OTHER; note = 2'-O-methyl-adenosine
  modified_base 16: mod_base = gm
  modified_base 17: mod_base = cm
  misc_feature 18..20: note = linked via phosphorothioate
  modified_base 18: mod_base = cm
  modified_base 19: mod_base = OTHER; note = 2'-O-methyl-adenosine
  modified_base 20: mod_base = OTHER; note = 2'-O-methyl-adenosine
  source 1..20: mol_type = other RNA
caattatgtttgaaagccaa

SEQ ID NO: 871 - RNA, 20 nt, synthetic construct
  misc_feature 1^2: note = linked via phosphorothioate
  modified_base 1: mod_base = cm
  modified_base 2: mod_base = OTHER; note = 2'-O-methyl-adenosine
  modified_base 3: mod_base = OTHER; note = 2'-O-methyl-adenosine
  modified_base 4: mod_base = um
  modified_base 5: mod_base = um
  modified_base 6: mod_base = OTHER; note = 2'-O-methyl-adenosine
  modified_base 7: mod_base = um
  modified_base 8: mod_base = OTHER; note = 2'-Fluoro-guanosine
  modified_base 9: mod_base = OTHER; note = 2'-Fluoro-uridine
  modified_base 10: mod_base = OTHER; note = 2'-Fluoro-uridine
  modified_base 11: mod_base = OTHER; note = hexadecanamidodiethoxymethanol-uridine
  modified_base 12: mod_base = gm
  modified_base 13: mod_base = OTHER; note = 2'-O-methyl-adenosine
  modified_base 14: mod_base = OTHER; note = 2'-O-methyl-adenosine
  modified_base 15: mod_base = OTHER; note = 2'-O-methyl-adenosine
  modified_base 16: mod_base = gm
  modified_base 17: mod_base = cm
  misc_feature 18..20: note = linked via phosphorothioate
  modified_base 18: mod_base = cm
  modified_base 19: mod_base = OTHER; note = 2'-O-methyl-adenosine
  modified_base 20: mod_base = OTHER; note = 2'-O-methyl-adenosine
  source 1..20: mol_type = other RNA
caattatgtttgaaagccaa

SEQ ID NO: 872 - RNA, 20 nt, synthetic construct
  misc_feature 1^2: note = linked via phosphorothioate
  modified_base 1: mod_base = cm
  modified_base 2: mod_base = OTHER; note = 2'-O-methyl-adenosine
  modified_base 3: mod_base = OTHER; note = 2'-O-methyl-adenosine
  modified_base 4: mod_base = um
  modified_base 5: mod_base = um
  modified_base 6: mod_base = OTHER; note = 2'-O-methyl-adenosine
  modified_base 7: mod_base = um
  modified_base 8: mod_base = OTHER; note = 2'-Fluoro-guanosine
  modified_base 9: mod_base = OTHER; note = 2'-Fluoro-uridine
  modified_base 10: mod_base = OTHER; note = 2'-Fluoro-uridine
  modified_base 11: mod_base = OTHER; note = 2'-Fluoro-uridine
  modified_base 12: mod_base = gm
  modified_base 13: mod_base = OTHER; note = 2'-O-methyl-adenosine
  modified_base 14: mod_base = OTHER; note = 2'-O-methyl-adenosine
  modified_base 15: mod_base = OTHER; note = 2'-O-methyl-adenosine
  modified_base 16: mod_base = gm
  modified_base 17: mod_base = OTHER; note = hexadecanamidodiethoxymethanol-cytidine
  misc_feature 18..20: note = linked via phosphorothioate
  modified_base 18: mod_base = cm
  modified_base 19: mod_base = OTHER; note = 2'-O-methyl-adenosine
  modified_base 20: mod_base = OTHER; note = 2'-O-methyl-adenosine
  source 1..20: mol_type = other RNA
caattatgtttgaaagccaa
